United States Patent Application Publication US 2007/0054278 A1 - sequence listing, part 38

SEQ ID NO: 94402 - DNA, 33629 bp, Homo sapiens
  misc_feature (1)...(33629): n = A,T,C or G
cagcctgagcttctcaaagatcagctgcctctgaggtgccctgccaggaccctgccagctcttgttggacagggaccgcctctctcctgcccatagaccccagggccagatgtgggacagaggaatgtgcatggtgggggcctgggcttctccgtgtgtgtcctgtctccttccagcttcttagacgtggtggcccagagtgcttttcagtgcacccgagccaggatgagcgagtggctgtgatgacccacgcagccagtcctctgtgcagggaggggaagggaggccctagccggatccacgctcacctcctccactctgctctcttccagctcatagacctgagctcccctctgatccagctgagccctgaggctgacaaggagaacgtggattccccactcctcaagttctaagccgaaccaaatcctttgccttgaaagaacagccctaaagtggttttcaaccctcagaaacaagctttaggctggtcgcagtggcttacacttgtaaccctagaacttgggaggctgaggtgggcggattacttgagcccaggagttcgggaccagcctgggaaatatagtgaaactcctgtccctacaaaaaatacaaaaattagccgggtgtggtagtgcatgcctgtagtcccagctacttgggaggctgaagtgggaggatggcctgagctcaaggagatgcaggctgcagtgggctgtgattgtgccactgcactccagcctgggcaccaatgtgagaacctgtcttggaaaaaaaaaaaaagaaacatgttttagtagaagttttatttgaaaaagaaaaataagcataaatatattcccagtgctggagagggtgggctgagggactggggccagcacggaccacccaaggcctctgcttcccgccgccaccctcctcgctgccattctctgggctggaatgtgaagcctcagtcactctaaatgaagaattttcttttgaatgttttgtatgtaaaatagcaagtggctatttttaaagttaagtttgtataaatagttagatattctagatttacattaaattgtaaaataaatggacttattgaagcatatcttgatttttaagcttatcttgattttcaaacatgcatagctatttttatcactctaatcagtaaggctactatctagactcgaatgctttcatacaagtgattttcaaaaattagtcaataaaaattgatgtcagtgcaggcccaggcccgcccccagatacactagtttctaggtctggggccagcctagtaattgttactaggcacacaggtgatgctgactcgatggcctgagacacaccccttgagaagaagctgctctggggagacgagggtatgagtggaaagaggatgggcgaggaggccgggcttacctggacactaaggtgatggacggcgtctgctgggcaggcctcggggaggacccctcagctttgctctcagcaggggcccgacaagctcagtgggcagtggcaggaactgagtgccactggaaagcccattccctttatttagaaaacgagctccaggaagccgctactttgtgtccatttctcttgaggaaacttaccaccttggttgagcggcttcatggcagacagcagcgagccagcggccggactctgtatttcggaccccactccagtgctccctgggtcataccaggatctgcctctgtccacaaagatgagggaaaatgatgactgtgctgtgctctctacttcctgcggttactgcgtgattctaaagctgccactcggaacagcgagtcctctgccgtcgagagcagggaggggtagggtggacaggcgatgccgtggaaagacgtctcggtggaaactgccatggtggaaaggtggcgcgcttctcacggctgagttgctgcgcctgcagacggaagctccccacaggcagagctgcttggatgtgtgagtcatgaagccagagaagccccgctccatgagcagtgactccccaggtaagactttcagccagtcctgcgctggccagagtcgccgggcccgtgggaatcacggcggctccacgtctccgggacagcagggaatcccaggggcctggtagtgacaccggagggtcctcagggaacctctggtctggccctcatttcccaggggtagaaaaggaaatctgaaattggattaaaccatgcagcaaatatttactgaggctctgctatgggtcaggctgttttctgctgggtgcagcggggtgcagcgctcaggtaccccttccctcttagggcttcccactgggtagaggagggagatgttcagctcccagctcatctgtaaccaagctgtgcctcagttgtctccattcaggccctgggggtgagcccagcctttggcctgtggccccaatcccgctgctggggctcctcccccctgtgcccttcccctccccggtgcggcttcagtgcagccaggctctccttggtacccaggccagacagagtgatctgactttaactctctacagacagacaggaagagggcccaggagcaggagctggacagagcagagctgctcctgtcctgaggctccaggcccattcctttctgtctgggtttctccactgggctcttcctgccgaagccacccagtctgagctcccccactccctctcctggtacacaggcccttggttcacccctcagagggctccgggtgggaagatgcacagttagttggagactgaagggctccgtggccccaggagggccagcccctttctccataggatggcaccgaacacctcagctgccactggagggccaccctcccaggtccaagacgtccaacttcatgtgattttttaccacatttcattaattttgtggagcaaatgtcttcccattttacatctctgaaatccacgtctctgacattgctgttggcaggcggcacctgggatgtcgtcatcctggccataactagcctgtagtggacctgggtgatacacaggggcctcttggagctacggagtacctaaaataccatatagttaaccaaaaagtagcagaaaatatgtgagcatggatctcagccattttgcgggttggctgcaactgggacttaacctgccataaccttagatcagcctgccacacccaaggagggcctgcccccagacccagactcaagtttagacacagcctaaacgtgtacctctaaatctgcacaaactcagctgcccagatactggatttccttatctcttccgggaaatgcaagatgaaattgccctcctgttgggtattttcctgatcctttattctgaaaaagtggtcatccttttccccacaggccctgtgacctccctcctgtcttgcagctcctcctggcaccagtccccagggctctcctgttggtagttcctgcttttcttcttggaaattcctcgtggacctcgagatctttaccctaaaatagttctgttgaatttcaccctggcaatgtaaattgatagcttatcttcacagatgccagacaatggacaactcaccatcagtcctctgctcacctgagacaaatgcatgtctgattgcttcctctgccctattgtttatgtgaaaatgcagattcactgagccagactaaggcatcagtgactgttcctctacctgcctctcacatggagattgtgtattcagtgaaaggctgatcaaagacccaaaggaatgcaacagtttatctcttatctacctatgacctgcgagctgcccaccacccccagttgttgcgcctttccagacagaaccagtgtacatcttacacgtattaattgatgtcctgtgtctccctaatatgtatcaaagcaagctgtgcctcgaccaccttgggcacatatcctcaggacatcatcctgaggctgtgtcactggcatgtccttaaccttggcaaaataaactttctaaattgaaacctgtctcaggtactttgggttcataccacaagggagggttctcatgcacatgtgcctaataataacaactatcacaaaagactgcaaaaaccacaactttacacaaaggctatcgtaaccttcctcaaaaaaaaaaaaaaaacaaaaaacttctgttgcaaggacatctgcccagcaactgcttgtccaaccctggagtgctgtcacccttgttattgatctttgtagccaaagaattatctcaaaacaatgatgtgatcctcattttccctttaaaaacctttgtcttcctaggccgggcactgtggctcacgcgtgtaatcccagcactttgggaggccgaggcgggcggatcacaaggtcaggagatcaagaccatcctggccaacatggtgaaatgccgtctctactaaaaatacaaaaattagctgggtgtggtggcatgtgcctgtaatcccagctactccggaggctgaggcaggagaatcgcttaaacccgggaggcggaggttgcagtgagctaagatcacgccactgcactccagcctagtgaccaagtgagactgtctcaaaaaaataaataaataaaataaaaacctttgtcttcctttacttccctgaatacccacatagcttattgtggcatgcatattcccattgcaatgccctattcacaaatgaacatctttttcgttcagagtctccctgtgctttaggtagaccttgtctagatgctaactcgtagagaagaactcagcttgaatatcacccctgggggatgacctccattctctcctccttcctttattcagcgaggttatgaagcacctgccctgggccaggggcttttctgggcatggagtaggagtggacagaacacaaaacccctgtccaacacacctcacagacattaaggattgagtgctgagtatgcttggagtcaaactgtaaaagatttgaagatatttattcatgtcatagtcccaggagatcctgagaacacgtgctcaaactggtggtgctacagcttttggtttcgtacgttttagggagacataagccataaatcaatacatgtaagatgtaacattggttccggaaaggtgggacaactcgaaggtggggtggggcttccaggtcataggtggattcaaagattttctgggccgggggcagtgactcacacctgtaatcccgccactttgggaggctgaggtgggcggatcccttgaggtcaggagtgagagaccagcctggcaaatacggtgaaaccccgtctctactaaaaatacaaaaattagctgggcttggtggcgggcgcctgtaatcgcagctactagggaggctgaggcaggagaatcgcttgaatcttggaggtgaaggttgcagtgagccgaggtcgcgcccactacactccagcctgcgacagagcaaaactccatctcaaaaaaatttaattaattaaaaattaaattaaattaaaatactgtaaaatacttcgatatctttcagggcctgccatctgtcatgtcggtatcctattgctacggagagtccgcctagacagtcttaagtctgttttgacgttaatgctggtccgaattccaaagggaggaggagggtctagtgaggcgggtcccacccggcctttcccatcagagcccgaactcgcggttcaggttccctctaggacgcccttggccgagaggaggcctccaatggctggctggggggcttagaattttatttttggtttacagcgcagaagaagagcagtgaggccggggcgcgggtggggagggcaaggcggcggctcaaaaaaaaagccagcccctcgcggcccgacagagtctcggcgccccgcgggtcggtggagcctcaggggtgagcgcaggccggagacaggggaacccgccgcgggacaggggaaggccggacggaacgcgggtaagctgccgcagcttccggccgggccactagcgcggaccctacggccggggcgggacttccggcaaggcgcggaagcggcggtagctgcagctggcgaagttgggcgactggcggatgcaggccttgcggcacgtcgtgtgcnccctgtccggcggcgtggacagcgccgtggccgcgctgctgctgagkcggagaggtgaggcgtccgaggctcccgccccccsccgagcgaatgtgtccccgraaacctgtccccgtccgtcgtggcgttgtgcacgtctcctccctccctgggccgctggttgcgcgcgggtcggcaggaggataccccgtcctctgactttggttcggaggctcctcgccctccacctgtgtagtcggaggtgtgcgcgactgcagctccgactacctgggagcagttccgcgcccctctccacccacgcgcgcccacccacagtgagaagccggcgggccggggtggggtggggagggaagggtttctcacggatctgcggcgtccacattcacctgtgagaccgtggacactggtgaggggagctgggatcgccgggccgggggcctgacctctgcacacgctgtggccgcccggtgggaggtccttgtcctccccactcagcagactggacaactgccgcgcggcgggtctgcttgttcagcgtctcctgtgttctccgctcgctggaggacaaagttttctccaggagcatttgcatttcttccggcatctaaacggagccccacgggtgcttagcattcctcgggcccggcgctgaaatgagcacttgtttaacttcacctgtgtggctccccgcgggaggcctcattcacagagtcacgtttgtggagctckgctttgcgccatctttggctcctgaccttgggcaagtgaattaagccgtcccctgtaaaattcggctaacacctgcctcacggggtgactggagggattagatgacatagtacatactgatgagtacgtgctcagcacatacgaggtacgcagaaaacagtagtggctattagtttatattgttaataaccatagctattatggtaggtacagtaagtgccaaagagaagggtaggcggaccataagcagaaatagttgtgaggaagggagagtggaggaaagcatcctagagatggaggtgctcagctgagtcgaaagaagagtaggatgtcactaagcagagacttggaggtggaggcggccctcccggcacagtcagcagtgcaagcagaatcacagaggcctgcaagtgtgggctggttctggccagatggagatggaaggagaggagcctggagcacgtttagccctgattatggaagatgctataccaggggctttagactgttaggtagacattagtctggttgatctgggataggggtggtctttcgcgtgtggtggtgtagttttgacaaagctttgtcatcaaatttctgttgttttgggtactatatgaagccttcttcagcagtcatttgccctgtctttcattacattcagcctacctaaacgaaccagctttctcatacagggtckgcacctgtgtagtttgctaaggtggtgtagggctaaagttggcctttccaatatttgggtgaatattttgttacaatcgaaaaggtagaaaataggtcataaactaggtggtacagctcttacaaaatatcgaaaattttaattatctttatatctgatcacttagaatctaagtcttagatagtaactagaaataacttttgaaaagagtttccttttttgataactgaatggtgctttgaaaaattttgttgagtttcgactattccttcgtgtattccacacacactggctgatcccctcctgctaggtattgtgctgatacatagatggggacacaaagatgagaaaataccacctcgttaatcttggggactcaggcaccaagatggaaaccggatccctgaagccacatggcaaagcagggactgcccggcaggccaggcacagaggcacaggagcacagcgtgtggggaacttctcagagctcagaaatcactgccgttttaccgaaggttgatttatgtattctctttaaytgaccttcccgcccgcaggttaccaggtgacaggggtgtttatgaagaactgggactcactggatgaacatggggtctgtactgccgacaaagactgtgaagatgcttacagagtttgccagatcttagacatccctttccatcaagtgtcctacgtaaaggagtattggaatgatgtgttcaggtgagtgcgggtcacagcacaaaggaagcttcctcacactgtggatscttgcagtggaaggatccggtaaccagccagaccgacgcctgtgctgcagcccagcgctctccctccacggtggtgctgaagactgcaagaggcctcagccaccctcggggctctgtgttagaggcgaggcctggaccccacagcacacccagctctctcactcctgtcattttgccacttgcctgaagtctctttaatgctttcttggaccttgagctgtttctgttgcccagttaggataggggagctaaggctgagggctcccctggaaggtgagcaccaatgcctgtgtgctatgtgggtcagcgattaggggatttctgagaaagaggtgatacatggcctgtgcctctgaaaacaagaaacaaacaaaaacttttctaaaatccaatataatctcaataattaagtgctgtgtgctaggcgtgtgccacatctaggaacattaagatgtcttcactgtgacctggctctgtaggagtttgcggtctagttgggaggacattatcttcacaagaggtgacagtgatgcgtggcacgcaggaagtaccagtgatgctatcagtcactgaacccagaggagggagaaacttgcagtgtggagtaatcaagaaggcttcaccggagaggaggggttgcaaacaaagttgtagagaagggactccaaatggggtaacgagagcagcgtgaaggggagaagaaatgctgattgtgtatttcaggaccgttgtaaagtttggctggacttttgttcctgcagtggaaggagtgtagggctcatcctctggtgagccctgactgtgatgaatgtcgggcagttgtcgaaggcgtctgacacagcaggccatgtgcgcgggacaggctgcccctgcctgagtgggctttaggggcagaagagccttgggttgagtcctgactgtagcttattatatgaccttgggcaatttacttgactttgtttttttaattgaaaaaaattctctttttttcctgccaacaaagacccagaagagatacttgacttttctaagccccaattttctcatctttaaaatgaggataacactgatgcctcacagggttatgaaagaattgagattaggttctagtatgtatgcctggtatattagtaagcagtcaataaacatagctgtttttcttttctatttttttttgagacagagcctcgctctgttgcccaggctggagtgcagtggcgcaatcttggctcactgcaacatctgcctcccaggttcaagcgattctcatgcctcagcctcccaagtagctgggattataggcatgcaccaccacgcccggataatttttgtatttttagtagagacagggtttcgccatgttggccgggctagtctcagactcctgacctcagaagatccactcgtctcagcctcccaaagtgctgggattacaggcgtgagccaccacgccagcctgctatttttattttcattattaaaaagatgagtctggggagctaagctatgaggacgcaaaggcataaaaatgatataatggactctggggtgagggataaaagactacacatcgggtacaatgtccactgcttgggtgacgggtacaccaaaatctcagaagtcaccactgaagaacttatccatgtgaccaaataccagctgttgcccaaaaaaccattgaaataacaataaaacgaaatttagagagattaagtaaattgactatggtcacctaaataatcaacggaagagcttgaatatgaaccctctgtgactctatgctataacatatgggtgtcgtatatattaacaacatggacaaaactgatggctgaattttcctggggaaagttacctgtagaatgcatgataaatgcattaaaaacttatctgtagaatgcatgataaatgcattaaaaacttctgcagttttctcggggacataagaaaaaaaaaagagtgtggcggccaaatacaggataaatctgggggaagaccaaaggcagagagtctcaggaagtgctgttgctggagatttggacttcatggggagggagtgtgggagtggaaggtgagggctggcttgttggacccagaggacaagtccaccgggcagtagatctgaggtgcttgttaaacacagacctggaccgaggtctgggggcggccctggaatctgctttaataagcacttcagctgtgctggtggtgtggggggttgtcagggtctttctttgagaaaaggkgtgatgcggcttagggactgatgtgtgtgggagaccagagaggagaggagtcagcagtagtttcaagatcaaggctgggtggctggggaaagcyggtttaggggattcctcatgagtactgtagagtttgaggggacaacagggaatccaagtgagcttacacttcacctgccagcacagctttttcagaacgtacgagtggatgcgatttttgaagtttagctcagctgaggccagataggaagagtgacttgaatagtatggcaaattaggagcggagctgggattaaaccccagaattaggagcggagctgggattaaaacccagaattaggagcggagctgggattaaaccccagaattaggagcggagctgggattaaaccccagaattaggagcggagctgggattaaaccccagaattaggagcggagctgggattaaaccccagaattaggagcggagctgggattaaaccccagaattaggagcggagctgggattaaaccccagaattaggagcggagctgggattaaaacccagctttccaggccagtgcttgctgccgccttctggcgctgcttgatagggactgagagaaggaggcggccgggtagagtcttttcccatctctggggctgcccccgaggtcgcccctggctccagccagcctgccctctgccctcgcccagtaccagctgcccgtggaggcattggtctttccgctgaagactcacttctctagtagggctctctagctcagagatttcttttgcattctttcattcaagacccactggccttcaaggatcagagtccagatacgttttagctgctgagtcttttaaatctgtctccctcccgaggcacatgaaaggcttctcttctttccagttagagaagaggctgggctactccattgtttttgctaatgccaaaacacacgccttcccatctgctgtttacgaaagggttaacagtgtgtcttttcagaaactgattttaatgttcagcctcttcaacatttattgatgactgtgatatagaaagtttgttgggtctaggacacagacacagattgcaccttaagtagtttatagtttaatgagcttcctggtaactttctaataattaaagcaaaatggaaagagtgtaataatatcaagtgttgttgcaaatgtggaaaaacatgagtttttatgaacttctagggggactgagaagtaggaaaacagtttggtgcctgctaaagtggaagatatccaaggaacctctgaycctgtgcagatctgtgatatgtctgcaaaacacaaacctcttgatcagcactggttttttttttaacccttgttgattaatagagagttttaggttaaatgaaaaaaatcacttataccaaaaatacacccatttttaaactcccaaaataggcatcataaccctcttgaagtgaatcctcgaagactatgaaattcttggtaagttttgctggtatcatggcatctttttcccatgttcagtcagtctgttagagcagaagttcactgaattaggatagcctgatccactttaagcacccaagagtttgctagttctcagaagtgtgtgtttgtcacctgaggatagtatttttggtatatttgcccagtgacgcagcattccaggctgagattgcagaatggctcatggagcccttgtgtagggaagcctctgactgtgtttctcctctgttctcatcacggcagtcatcctcacggaagaaggcttctgtgacaaaggtgtggggggttttccccatacagcaagcagtggacaccgactgggtgtcctctgattcagttccgataccatctacttggagatagtgctggatcccaaaggttgggggttcagtcccccagacggactccccccacaacagcagtcgaaagtatgggcctctagaacttatgaccaactggcttccagttgggattcccataacttcctctttgggttcaattattaataatttgctggagtggttcacagaactcagaaaaacacatttaccagtttattataaaggatgttgcaaaggatacagatgaagagacgggttgggtgaggtatggggaaagggtcatggagtgtccacaccctccctggggaccaccctccaggagcctccacaagtgtagctgtgcagaagctctctgaacccagtactcctgggtttttatggaggcttcatgacatcgccattccttcccccaggatatacagtgggactgtgtctggggagggtcttaagacccacagtcagaaaggtagacgcttgtaatcctagcactttaggaggctgaggcaggagacttgcttgaggcctggagttcagtatcagcatgggcaacatggcaagacctcatctctataaaaaaagaaaaggttgcagtgggccaggtgcggtggctcacgcctctaattccagcattttgggaggctgaggcgggcagatcacttgaggccaggagttggagaccagcctggccaacatggtgaaaccccgtctctactaaaaatacaaaaattatctgggcatggtgctgcgcacctgtaatcacagctattcggaaggctgaggtgggagaatctgcaagggaagtctaaaggatttcatttccactgtcactcaggcatcttctcttcctcacctaagccctgctgtgttggaggagtcccagaggcagggttttagtgagaccctcacggccactccccactcctgaccccataagccctgtgagcctacacagagacggtggctcctgagccgtagtggcagagwataacaccttgtcgggtggcccatgcagcaggttataaacaaatgttcgatgactgacgttctcctgttttgcagaaaattatagttttggtatgacaaggggaaattacattaaacaagcaatttagtgaactttttttttttttttgaggaatgtttcacacttggaactgaagtcattttcttttattctagtgactttttgaatgagtatgaaaaaggaaggactcccaatcctgacatagtttgcaacaagcacatcaaatttagttgcttttttcattatgctgtggataatcttggtaagtaatttgggtttaaaacatttttttttttaaagacagggtctcgctctgtcamccaggctggattgcagtggtgcgatcatgactcactgcagcctcgacctcctgggctcaagagattctcccaccccaggctcctgagtagcttggaccacaggyatgccaccatggtggctaattttttgtggagatggtgtcacaactgtattgtccaggctggtctcagatttctggccttaagcagtcctcctgcctcggccttccaaagtgctgagattacaagcgtgagcccctgtgcctagcctgtttcttcttgtggaacctcctgatactgaattgcttgcttagaccacctcttgatgtctgtggctatgctttatgaattttaggttcttcttcctgtcccctgccattggggtcaccataatgagtttctgaagttctggctcaggcttcttggtttgctctgtcccactgcagctcaccctgttgtgtgttgctacgagataccattgtaagccaggggcccagtagtgtcggcactttcagcaatgatgtagattaggcttgcagattcaatatgtcagcaacctaaagctgagttgatgataatgatgaaagttagtttgtggagttaggaataaacaaatgcctacaaaaacaaaaaatcaaaaagaaaaatcttaaatttcaacattgggctaacaccaaaaacatgaaacttaatagagataaatgcaaagtttgctaactaggttcagtaattctcctaggacaagattggaaagacctagcttggttgccattgaatcttctgccattggttgcagaaaatctgggggatttaggtgcccccaggctgactgagccagtagtgtgatgtcttttgtcagagccagcacagacggagctcaccttgatgatcatagaatgtctaggaaggggtgatgcgtcccctgtggtccgtcctggttagaccgtattagttattcaggaaaagagtgatagactgatagaatgtgaattgatttttattttcagggtatctggaaatatgtcctccctgaactgttgaaattactttgggtcgtagtggcagtggtcaagcgtgtgagttaggatgacattctttgtgtgacaccagcagacagttaggactggcaggagaaagagttccctgaggtggaggcgcaggcagctgttcaggaagggaaggcttgcctttggagagcattaagctgtcacgaaagctttttagggagcccctaggtggctggctgtcaggcacgctgtggaaggaacttctgcagtgaatgtttccacacctggaagaaaggcatgaaccgtgcagcacaggatgagaggacatgacgcccagacttctgaactcaccgcgcttctcagaggcatcctgcgctttttctagtataagtgctgttctttgaggacacagatgtaaagtggattgttttctctaggagaacctcagtcaagatgagattatgtgtctctaaagtgcctttttcaggtcgttaatatgcagcagctaattcttgctgtgtcttctgtttacatggagctagtgtggctggtccaggatggctgtgtcttctgtttacactgagctagtgtggttggtccaggatggaatccattttgctgcacctttcataaaagtctcttgcaatactaaatatctgtaattttttctttttttgagatggagtctcactctgtctcccaggctggagtgcagtggtgtgatctcggctcactgcaacctccacctcctgagttcaagcaattctcctgcctcagcctcccaagtagctgggattacaggtgcccaccaacatgtctagctaatttttgtactttttttgtagagacggggtttcatcatgttggccaggctggtctcaaactcctgacctcaagtgatccacccacatcggcctcctaaaagtgctgggatgacaggcgtgagccgctgygcctggcccaaatatctggaatttttacacaatgaaaaggttctggattcatatgcaccttgttaggctctttggctttgtgtaatatgaaaagaagaaacagtgtgctggatgattcttcactctgatgaaaataatacatatttattacagaaaatttaaaagaggagaaacgacacctataatttcactctcagaatcaaaggaatagacctgagatttttcttcaactgtttctgtacagtaaaaaccgtggaatcatggtgttacatcctcgccctgctgaacagtgccgggcattttcccgtgttagtaaacattctctgtaaggacccccattgttayggcagtgcattgtcattcacttcacattctcccagtgttgaacattttggttcttttttttttttttttcctcctgagacagcatcttgctctgttgcccagactagagtgctgtggtgcagtcttggcttcctgcagcctcaacctcccaggttgaagcaatcctcccacctcagcctcccaagtggctgggactacaggtgtgccccaccacgcctggctaatttttgtattttttgtaaaggtgggatttcaccatgttgcccaggctggtcttgaactcctgagcacaagcaatcatctgcccgcctcggcctcccagagtgctaggattacaggcatgagccaccgcgcctggcctcccttcgtattatcacaaaccctgaaaggaatattttgtgtttaaatctttctgtgcctttcagactgtttccttaagccagaaattaactttggaaaggctcttaaaggtgcaataacactttaagtagcaaggttgtatcagcttaagagttcaaggctgcttgtttgatgaaattggatgtgtgcgtctgttccctgggatctctatgtttgggtgcagggtggattgtgcagcccctcagcctaagacttggggtctatactcttcttttgtgccttggtttatgctgatcaaggcctgcaagtatgagtctaaaacctgatccttgtgttctaaaaacctcacaggggcagatgccattgccacaggtcactatgcaagaacttccctggaagatgaagaagtctttgagcagaagcacgttaagaagcccraagggcttttcagaaatcggtttgaagttagaaatggtaagttcatgtgcccaggtcagagccaaattcttgtgaacagaktgaaatctttggaggaatgacagtgggttgtgcctgaggatcactgccacccctccctctgtgctccagagtagcttgtatgggattcacatttgaaaaggtgcagttaccaagaggacattttcccggagggcctgtgattgggtagtaaacagtgtccctgccggccatggtgagggctggtggaaagtgacatcagatactgataatccagctctcgacactgtgtggtgatttgaatgttccaaaaatatctgggtaaatatttgacagtgataattggggtgctgtcagtctagccaaggacctgtacttagcaacaagttctcaagggcgtgcggttcaggcagactttcaacgtgctgtgagcacaggacctgctgtggatcgcatgggctcagcagtcaggctttgtagccgtatttacacgttagtttatgcgtgttagggagccaagtttcacctttctagaaaaaagtcaatggcagacagtgagctgggaagctgctggcctgtcctggtgtacattcgtgtgtagaaaagaggaattccctgtattgttgagtgaaaaaccaagtggggctcagagccgtgtttccgcacggagcgtccgtccatcagtggggacccctgaagggcagccttgctcttttgtccggaagttcagatgttggagggagccttgtcccgccatctggggaataggggtctctggggctggggcagggctttacatacacacatttcttttttaattattattattaattttatttttttgagagaggatctcactctgtcaaccgggctggagtacagtggcccgatcttggctcgctgcagcctccacctcctgggctcaagtgatcctcccacctcagccccaccaagtagctgggaccacaggtgtgcgccactatgctcggctttttcattttttgtagagatgaggtctcgttaatgttgtccgtgctggtcttgaattcctgggctcaagcgatcctcccacctcggcctctcaaagtgttgggattacaggtgtgagccaccaagcccggcctcacacgtttcacatcactcctcttagcagtccatgaggtgtatgctctcatcccgtttcacagatgaggaaaccgaggcccggatgaagccatctgacctgggtccctcgggtggcagagctggatttcagtgcacttccgctcactccccagcccctgctgcttctgctgggtcaggccccagctgagttctttcctcagcgttgctgagcccatcctgaaggctgcagtgatggggcagggccgtgcttggtcaagggagccctgagtgtgccaacagtcgtctgccgccctctgttccctcctcgccttccttccttatgccacagggtgatcaggtaactgtactgacttgagcccagagaagagcagcccactcccgtaagacagccccccatttcaggaagacatgggtttgaatgcagataagacagccccccatttcaggaagacatgggttggaatgcagagtcctgccacttgggaactccagggtggaattcaccaagtaattgtgcatttacggggcctgaggagatggagggttaatttccatgttgaatagatgcgcctgcttacctcctagaacattacctcctagaacactgtgtgccctgcagagccatcgacctttattataggccacgtgccctcggaaacttgggacagtactgatgcgttctgttgagtgcgtttggcatgtgggaattgtgatggtgcacagtgtcttggccttcactgggttttgtaggcacactaaggtttccatttcattcttcttcagttgccctggcccagcctgggtctctgggtagagcacctgcaggggcagtggacggcctgggctcagggtcggtcagcacctgagaccagcgctcctaggcctggcctgtgactgggctgattttcccccacacagcgtgctaccaccggcctggcagagccagcacggcagccggcgtgtcagtgaggctccagcacaggcagcctcctccaaatgttgttcattcctttctgtgctttttcctctatagcagttcagttagggtcgccagcttgcttttttgaaaatcatagatttttagtttgttttaaaatgacgcagaactaggagaaaatgcaaatggctcctagttttctgaggcttttacacacatgcagtgtttgactgcagttagtttgggattgaaagtggactctgaggccaggtgcggtggctcatgcctgtaatcacagcactttgggaagccaaggcaggcggatcatgaggtcaggagttccagaccagcctggccaacatggtgaaaccccatctctactacaaatacaaaaaaaaaagttagccgagtatggtggcacatgcctgtagtcccaggtactctggaggctgagacaggagaatcacttgaacccaggaggcggagattgccgtgagccgagatgtgccactgcactccagcctgggcgacagagcgagactccatctcaaaaaaaaaaaaaaaagtggactctggaaagtgctctgcttccgtggcgactggtcggctgaacttggtctcacttgtcactcagttctgctgtttgtacctgccaagtaagggagggggactcgggaggctgggcagcctccagccccaccgcctccacctgcatcactttgggcgagtcatatgtgatgaactgggccggctccagtctcccctctgtaacgtggggagaattctccctctcacggctaacgtgggaatcggcagatggaaaacactagctacgcagagtgtgtactgtacacrtggctctgccaagccaggaagggtaggtgtgctgtctgaccgtcacggcatgtggcgtgctctgagtgtaactcgaaaggagaagtttatgagaaagattgaaagaagccagaaaactgacgttcgtcttagttttttgccattgatcattgaactcgagagtggagaactggacggttctaagccaggtttactcacacctctgctccgttgccttaaagccagaaatggttctttacaatcacatagggaatgtcggaggaactgcagggtcacctaacagatgtcagctgagactctcaacaaaaaaacgtttttaccaagaaagctaatgccttcacaggtagggcgctgctggaggcatgtgctggccgccgggcagtgaacctggaaagtgtagagtccttgaaaccactgtggcacgaacacatcctgtggttgttggaagaaggcacagctgacactatatcagtggaattttctgccagcaactagcttactccattttccaagatttggctgaatttattttaggtgtttttttttttttttcttatcacttgagaacattttttcatgtgatgtttcatctttgaaaatattataatctgaagtatgagctggaataatttctttgtcatgtaaaatccttgtttttttttttggaggtgcgaatttttcttacattaacccgtggtggtcttttccctagtagttgctattgagtgttgatgtctgcctctgacaggctaggggtagtctgtctaagtgaacagaaggacattgttgaaagtgaagtatcattatttttattcctgcatcgtcttttgttctttattcttggcagyggtaaaactcctccaggcagctgacagctttaaagaccagaccttctttctcagccaggtttcccaggatgcyctgaggagaaccatcttccctctggggggattaacgaaagagtttgtaaagaaaatcgctgctgagaatagacttcatcatgtgcttcagaagaaagaggtacgagtgagcagttgcctttgattagtgcctgtttccctttcccractgcatggcamggagcagctggacctgtgggtcccgcaccacttccccttctccaggacctaacatcaaaggcgggccttggagcaatagatggaggagtttgctgaggcgcacggtacagggctctgctgacatcgggagcagcctatacgagactccttgcttttttcctctcctctgcccctatgtggtaggcagctttccccacagccttagcagctggtggggtgctcttgggatggcctgcctgccaggtgagtgccaggcagtgtgatgcrgccccgagacccctggaggggcaggtgctgtgccgccgtctgcacactcatgtgccctgtcacccgcttgcccggcacagactcgttcggtgccatctgttcgggcgctgtgctgctgggccgcgaggaattggtgacgcgcacacagttccatcttcgcctccatggagcccgcccgcgagtgggggacacaggcaggaggccaatcagtgtaaacctagaaaaygtctacggagggaggtgtaggaccctgggtgggaagcaccagtggggtctgagagtagggaatggagatgccaaaaacggcctcaaaagaagtcacatggaacctgagacctgaaggaggagaggatccggtgtcccagagagggctgggaaagtccagatgagggaacggcagtgcaaaggccttgaggcgaggagaagccagggagccgctgtgggggtgcctgcctgtggccccagctcctcaggaggatygagcgcacccaggagtttgaggacagcctgggcaacacagcgaaactcgtctcaaaaagagagaacccggagtgttggcggaactaggatgaagcccgtgggagggccttggggatggagggcgagggcgctgtgggatgagcctcacctcttcaggggccagtgcggtgggagctgttgctccttcgtgtctcttcctggtaatggaaacggccatacctttcatcagagccatcttccctgaagagcacrcccaccgcccgtcctcctctcctcttgttttccgtttccggtgtcgctctgtggtgggagccgcagggatggaagggcagtcttgagagacacaaaccagagtaaacgatgcagcccctgatggggccacggtggagagcgcacgccacccaggctccccagctagggcagatgtgcttgaggaaggcgcctctctcctctgactcccctggagccctcccctaaggccttagcttcaggcctggctttcctgctacctgccccttctctggtccctgtctctcccccactcctcgcaggacagtggcctgaaggacctgaccgggttctgctttcttccccggggcagctggtgtgagggtctcccgcgcagggtcagaccccgcgggccgagacaatgaggcgttctctaaggctctggcatcgtgtgcgccggctgtgactggcggccgagggtgccggtgggcagccgggcccctaccctggaagcaaagtgtggggtgaggccgggaggccccagggcccgctcaggacgtctgggtacagcttgggccaccgccacttctgctcctctcacggctgccgtcttctcatttcagagcatgggcatgtgtttcatcgggaagaggaattttgaacatttccttcttcaggtgcgtgctgctctttgacacaaagagatggggctgcgtgtctgccctgggcctagatctccgtcggtaatgacatgtttgttttccagtatctgcagcctcgacctggtcactttatttccatagaagacaataaggttctgggaacacataaaggtgaggtgcagactctgccacttgtcatctgaaatgcctagagctgtggcgtttcagctctgggagactagaccagagttccygtcgtcccttccacttggctggmgaattgtagaaggctctgtggggcggccgggggcgggcacggcctagggtggaacagttgccttgatggtggctgggtgcacttccagatgtggcctcagctgagatgctggagttcatgaaaagcgcgcctctgacttggaaggactatactctgtgagttacgtatcaagtccctgtaaaaagaatgatttccttcctgtgtaaggaaaatgttaaactacacaaaactccactctgattcagggagtaaggtggacgtcccggcatggtgtgaatgattaaggaccacatgcagcgatgggatcaggcgtccgcgctggccagagtgctgctcgctcatgtgcagacccttactgcggtgaggcctgcgtgagcctgtgctgtgcctggtgtcaggggacaggctccgagtcagtcacagtgtgcagtcctgctgtggggacagagtgcagccattgttgggttagtacagtggcggggatgtgcctgccggcgtgatgatcaggcaggtcttgacacagcacagacctgagctgtgggactggccaggagagccaggctgcagctcaggtgtagggcgtcttgcagtgaattgcacttggagatcttccacctcttgtggaggggagacggcaggcggagccggggctaggcattcctgagacaggtggaggtgacagctttgcttgggacagaactgccagacaggattgcccatgtatctgccagccctggccccagcaggagccagttggatgactcatggcttccacctgcagttcacttcactgaagaaggctgccggcccaggccacgtggtaaatcccatgaggttctctctgcctgtgtgccccactgcaggggagggaggcagtgagtttgccatctgctgtgtgacattgtgagggtgcgcagagcagctgggggtagccctgatgcagttactgcattagatggacactgtgaagacgtgcagctatgtcatgggctcagcaagaagggcccctggcgtcacacagggcacccagccgcatcctgggcctagggtcaggggctcctacagctggaacctgcaccttctggggcacaaggtgccttctttgtggccaccacaccccatgtccagcccaggcctggacaatgatgagatgtgctcaggtgcttggtcagggctggctttggtggttggagaatcgtatcttcctagtgagttacaccattgctgggcctgctctgggctgccctcccagcatctgccttcatgatgaggcgtgacatgtgggctgtaacttgttgccyagcctcatggagaaactgtctttctgtaggttggttcctgtataccttgggccagagagcaaacataggtggcctgagagagccctggtacgtggtggagaaggacagcgtcaagggtgaygtgtttgtggtgagtgggccggcctctgagacagcactggggctggttctggcagggccagcagtgcttccagaccagggcttgagaaggcctccagmagccgtggcttcctggaggctgtgactaactstgttcctgtccttggtcccctgcctttcctgggactggccatggtggcaggagagttttaaggtattcattaggctgagttgtatgctggtctcttaatcatccctgaaccccgatacacagrtacagtttctccaattttatgaaagaggacagcgacgcccagagcttgggtggctcatccggtggagagggcatggcctcagtgccaaggatggtgcccaccatggtaggatccagtgagttgttgtcaggcaggtgcagatggccaagccaggatcaaaccaagccttccaccacagtggggaccttaccactgtgaccctggcctcaaagcagggccgctcagtggcggcaagctcaccccaccttcaggggaccttgccagtgtctagaggcatttttggttgtcacagcttgggtggaaaagcaaggacgcgggtgctgctgcatctgtgggtcaggccggggatgctgcttgccgtgttcagcacagcctcttccctgagtgacccggcctccaccttggcgcgtggagctgagaaggcccactctcagcaccctggctgccggctcatgttctggcacgaatgctggggcgccttctcttagacggaggcgggggccagcaggccccacccaccgattccaggacatctccttactaggaagacctgtggggagaaaagcctggctgcgaatgaattaaatgatctagatttcagtttgctgtgagaagaccagaagggttaaccaacggcctcctgtccctggacgggtcttggtgcctgcttagaacccaaagcccttaacttcatgctcctcgtcctgcttcaggggcggggcttggcacaatcccaggaggtgccaggtctcaatggcccgaggccatgggtgggtgacagggagcaggggcctcagaaccaacctagggtatctggggccccccagaccagggccagtcctggggcacctgtgggaagccagcagctaccagtccctcctttctcctcagccatttggtgtgtggaggaattcctggggtggccttgagagaagagcccgtggtgtggctggcccctgtccctgcgaatagaaaaaccagtcctcgaggggggccgtgctgctgccccacaggtggttgcaggtagagggcctgagtcagacttgaacctgcagcattcactgtcatgggctcggatctcacccctgcctcttgcccactctgacatggtacytccttcctgggccttagtctcctcatctgtaaaatggggattcaaaggcccggcgggtgatgagatgaatttctgtgggtagaacacttygagcggtgccagcaccgttacctgtgtgtgtgtgtgctggtaggacagttgttcccagggaccacactgaggcyggccttggggccaggtgcccctcggcgtccccaccttcacattccattctgcaggccccccggacagaccacccagccctgtacagggacctgctgaggaccagccgygtgcactggattgcggaggagcctcccgcagcactggtccgggacaagatgatggagtgccacttccgattccgccaccagatggcactaggtgactgacgggagggctcctgaggacgggccccttgaagctgagcttcctgaggccagatttgggccagggatgggagaccctggggtaggaaagtcccgttgtggagatcatttggagattacctaaagtatttagaactcccgtgtcctgtgcctgccctgagcgaggcctgggggtgctgggagcagatgcaggcaggccccggcgtgttgggctgaagcaagtgtgtacactgccccgyagtgtcctgctgcgtccagggcccaggctggtgccctgcccttcccctctaagcaggggtttttgaccccgtgggctggtgctcctttctccctgggggcctgaggtcgaccaggaaaggcctgtgccccctccaagggcccctctcttctacccagtgccctgtgtgctgaccctcaatcaagatggcaccgtgtgggtgacagctgtgcaggctgtgcgtgcccttgccacaggacaggtgcgtggggtgtgggggtgagcccggggaggactgtactgctctgcaccctgccagggcacccgggttacagaggaaggggctgaggcccaggagtagggtgtgctcggstcacacagctggtgagggcagagtgccaccagccctgccctgggggctcctcccacagtgacaactgtgagaggatttccactctggtgtcaccaaccagccagttcctgctcgggccctgagaggctcagctgctgcccgggccccagaagcgaggacagaaaatggaaggggcatgaggacagtgctcaaagaggcagagggtcggggcccctgtgggccgagtgtgcaggagctcccagggtgggcgcctggtgggtgtaggcctgaggaatctccaggggcaggtggtgggagggaacctggggtgagggaagcggaagcatcctctggctgccaccatgctccttcctgtcacagctccacattcccaaggggtgcagagacctgccagtcccttggagtcccaggagaggcccctgtgactgtcccactcagggagaggtaccctgaagaccctccctagtgaagccactgggtgccccaggcctctcctctcctgttcagcagcagcagcagcagcaaaaccctgctcccctgggagctcagtgcctggtgctccgagcacaggccagsccccataggggagcactctgcccctgcctgccctcggctggctccctgtggcacccctgatgccagggtctctcccctacagtttgctgtgttctacaagggggacgagtgcctgggcagcgggaagatcctgcggctggggccgtctgcctacacrctccagaagggccagygcagagctgggatggccactgagagccccagtgacagcccagaagatggtccaggcctgagtcccttgctctgacagagatsgatctgctagaaggaacctggagagcaggacccakggctgggcggctggtgagcagtccaggtgcccaagggccagcttgctgctgcccaaagcagaggaagccgggctggctgasggtccgaaaagcctgcaggggcccggygagccccaggaagagcctcagctccaggctggggctctggctgctggagcatctgctggctggtggggtggcccgagttccccttcaccgcccccagggagggtttcccacctcagagtacaccraggggacctgcagagggggctgtcgggacagcgtggaataaacattatttcaaggacacatagtctgatcgctgcttccactggggcccagggggctccacatcactgactccctggcgtggaaaggcaggtggactgcagacgcagccatggcaacctgcgtacctctccctgaggtcccagctgctccatcctctgcccccgtatccctgctcctggactccagagtaggtgcctgcgatgctgacctgtgtccttggctctcttcctcttgctgggcttgagtccttcgtagcgtgttgttggtgcctcaagacaggttcctgcggggaccagaggtgcattccccttctctgggtgggaaggttccagaggcagccaggtggtgcgcagagggccttgcccagatgccctgagttcttgctggtgcgtcagggtgggggctgccatggggcccactgtccatcctgacccctcctcccatctccccactgggtgtcccctgacctggggcacccttccttctagcctaggcccccacgcagcagggagtgtcctgagggtgaggagtgggccagaaccccgcaggccaggtgaggaaacggggcctaaggtggagccgtggcccttgctgggctggggtggggaggtggggggtgtggggtcagtgctgccctggccaggggcaagccccagctctaccaggcaggcagagcgctggccagtgggaccagacaggcccctggggatcctcggcccagctgggcatggaggccgagctaaagcgccgcgtttgttctgccagctcagcccagcacggagcctccctgggctcaggggttccctgatttatggctgtggtcgggcctccagcctgggaactgagggtgggagagcccttgtggtgcctactgctctgccctaggtgaaccctcccaggtcacagaaacatgagtaggtgggaggtggggcagccaggcagaaggtggtgtgggcascaggccagcagcgctaaggctgcccccgctccaacctccagcgggctccaccgtcctgccagcctcagggcctgtgcatcggccagtggaggaagcggggacacaaacctgcctctgcccccttgagcccccaggctccatggtgacagcttcctgactggcagggctcccctctctagcaggcacaatggcctgccctgccccctacaaggccactggccaactctggagggctttggtgcgatgtctcagagattcagcagaaactgttggccaggggaccaagtctccaggctgctcttctggcctctttcctaccctccccagcacccaaggctggcacactccagaggctgtgcccctcagatgacttcttgaagacctgggggcctccaggagcacaggtagctaggtagccccttctgcctgcaagggtacccccagtggcctggccttagccccttgccacacctatccatgaagacgatgggggaacattttccaggccaagagctgggtgcctgtacacctacacctactccctgcttgtgatacaaatgaaagcaaagccctcgctctcctctccccctacgttgttcccggataatctcagtgatacatgggtcctaggatgatgccccctcacctcacacctgggaggctccttcccgaggccctgagctggtttcaaacaccctgagcctgccttctccccagtctctggctcccatgttgccctgtgccggagccttgcctgggcccaagccccttccttcttggggaggtttctttttttttcttttcaagagacagggtcttgctctgttacccaggctggagcgcagtggtgtgatcacagctcactgcagccttgacctcccaagtagctgggacaacaggcatacaccaccacacccagctaactttaattttgttttagaaacagtcttgctatgttgtctaggctggtcttgagctcctggcctcaagcgatcttgcctcagcctcccaaagcactgggactacaggcatgatccactgtgctaagttttaaaaactgtagagatggagtcctgctgtgttgcccagtctggtctggaactcccgcctcagccagccactgttgggattacagacatggaccactgcctgaccctcctgggggtcttaacaagccttgcctccaggctgaggagcccaaggcgaggctgaagctgtgactgaagcagctgcggtcacccctgttacctgggccgaagcagctgtagtcacccctgtcacctgggccgggggagtcgacgccctgtggcttggccggtgtttgtgctgtcatctgttcaggcaggatcacagaggggctcgttcagccctcacccgtcacggtctgctgcggatgctctgcggagcacttcgtggtcctcacatggacatcctggcctggctgatggacaggcctgctccgggctacctggactgctttctctctctcagatgcttctagtattttcctgctaatcatggctttggggttgaggtagaaatattctatcatgttagccactgagcattctaggatgtaaacgttagcaggtgaactgaggagaaagcaacaacttgaaaaatgacctcaggcacatgggtggtttttcctctctcagatttgacccgggggtggccctaatctgtggtcctgtgcagccagcaccagggcaacaactccagagaggcctgggaaacgggggcactgtggactagagagggttggggttcccatttttctctctttgctgtcactacttttccttaagggtgagccctgtttccttaagggtggaagcgtgagacagtgcaggtggctagagctctgggagaaacccatctttctggacagagaaaccaagaaaagggaccccagaagtgagaaaatgcaaggcaaattccagcaaggagagtgctggagaagcagacccccagattctctacatgtgctgacacacgtccctgcccaccccacctgtgagtgcaggcaacgacccaaaacagcacagccaaggccaagggctgacctggtggtggacctgctgctcgtggaaagagagacagaaccagtggtcagaacctaaaccaggttgcctgctgctgaaacaaacacatgaaatgacacttacaacgagggtgttaacaacccagagtctaacctaacattccacatgacgagtgaggattcaacttgcagttactcagcacacaaccaggaaaatgcaaacagaaaagacgatttcagccccaagatgctcaaacgttcaaattatcccagaattcactgcagtcctagttataaccatgcttcatgaagtaaaggtgaacactcttggaatgagtggaaaaccagaagtacccagcagagaaataaaaaggaacctaatggaaattttaaaacttaattacagtatttgaaataaattcactgggtgagttcagtagcagaattaagacgacagaggaaaaaaaatcagtgaacttgaagacggagcaccagaaatagccaaatctgaaggacagacagaaaaaagaatgaagaaaggtgaacagagcctcagggaccagtgggaaaacatcaagaggtctaacgtctgagtcactggagtcacagaaggagaggagaaagatcagtgcaagaaaagaaaactgaagaaataatggcaaaaaaaaaaagtcctcaaatttggtgaaagacaaaaactgcccatctaggctgtggcaggcctactagggaatggacaaaaagttccggcacgttccactggctgagggagcatgggacacggacagctcagctgcacrtccgtaaaccgtcccttccacggccaccctgggcatggggaggggcgggggtgtttgtggagaaaaaccagcaccgcagaagtacaaattcaaaaatcttaatttattgtagactcttctcatttgtaattccagtgttttgaacattaataaatacacgttctgttaaaaacctccagtgtctaatctctcccataaagtcttaagtaataaaaataggtttacatttttcccatctcaataaaactgacagttgttttttggtaacagttctgatcaaattaaaaattacacctcgtgatgttggctgtggagtacgtggaaaaaaatagaacaaaaaaattacacctcagggggcagaatcctgttaaagtcatgaaaggagactgttcgaagacttaaaaaccttttcgtacttaggaaacgccaggggcaaacgtttaaagggactagagttttttatcttcgaaagaccactcacctggtaaggcacatgtataattcattcaggtgtgaggactctgggatctcatttcatcctcctgtcctggaccattttcagatacgcttttcctctcccataggcatctgctaacagtgctcacattttcatcagggtcaagtttaaaacagtgtggacatctttgcattttacttgattttcatcctattttatggtttctcctatttggaagcagctgtgctgatcacttatttgggcacctgatttgaagaacaaaggaaacgctaaaatcaaacatgtctgacagttccgggacccgttccacagcccctcgggccacgctgtgccagctgcctgcagtgggcccgaccttggtgtgaatttccaaaaacagtttggtaaccgttgaagagtgtggctgtggctttgtccctctgcacaattggccatttgaagcaaaatgaagtaattggtcagactccagaggggagaaccctgcctggagatcctcgcagtctcagagagttagagaattggcaggaggtatgtaacggcctggaaggccccacacctctgtccaaatcaggaacctgcaacgctttaaggtcccaggtcccacggggagcaggagcaaaggacaaagccatccccacctgcagctcccgggccacctgggaggcggtgaggggagggggtggtggtcacagaatgaccaggtgaaaaatgacagccgtgtggcaaccgtgccccacagtgacctcagcagggctcctcacacctgcctagtgctgcactgccctgtcttgaattcacacagccggggcagatggcagcagaggacaaacgcacacacagcgaacactggggacccagggggccggcggggagggcccacaccatcctcacttcctggccgaaggcagctgtagggcttctagccgcttggttttagccccactgctgacgtatttcccacctttgatctgctggggcaccagtttcgtcaacacatgccagattcaagtacaactgtgcaatcttgacagagaagacagcaagagatcattgcatggatctctcgggataacaaagtcagcacgaatgcaatatatatacaggttgcacctcctcagagtcccatacaaatatataaaagtatctccacctttcccacatagcgaagtgattttaagacaaggggtgcctttgcaaaggactgcccgggctgccagccacgggtccgcactgccatgagatgcccgcctgggcggggctggaccgcggtctttggtctgtgcccggcgttcctgaactctggccagcctctgggcccagtctggggtcccctctcagttctggctttgactgcagtcttaggactcagcggtgctggcccagtggtccacgcctccctcatgcctgtggcctttggcacttgtcaccaggtctgacaggccctgagctcctgggagaaccaagacctttgtgtctggatgatcagtcggggggctgccaccatggggaccgccacactctgggcccactccacttcaagggcagtggccccttgggctccaaggtctgagggtgatgccgcagcctgtgtggggtgacgggcttgcctcacggtttcctgatggttcaaattgaagtttcattactgatggttcaaattgaagtttcattactgcctctgcgcgtgggaagaagccagcaagcaggtgaagggtcagtgagggtagcggcttggtggggc

SEQ ID NO: 94403 - DNA, 16969 bp, Homo sapiens
tgacatgaaaaaccgtgcaaaaatacaaaaatctataaacttcttgacaaagaattcaaaataattattttaaagaatttctgaatttgcagcaaaagtttgctatagagcaacatgaaagcacagaaaagtatgaaactcattgattaaggtaaatatataaaaaatacagaacactctaatagtgtagtagtggtgtgtaaatcagttttattgctagtatgaagcttaaaatccaaaataataataattatagctacaataatttgttaatagatatagaatattaaaaatatataatgtgacaccaaatatataaaatatagtgggctgagtaaaagtatagagttttgaatatgatcaaacctcagtttaaaatagtttgctccaactacaagatagtatgtataagcttcatgctattcggaaagcaaaaacctatagtagatacccaaaagacaaagagaaatcaaagcatgtcactacagaaaatcataaaatctcaaagaacgacagcaagggagaaataaaggaacaaaaatatgttaaaaggctgaaaagcaatgaacaaaatgtcaattgtatgttcttatctatcaataattaccttgaagataaattcattctattctacattcaaaagccagagtggctgaatggattacaaaaggagacccaacaatatactgcctacaagagactcacttcagcttcaaggacacatatggtgtgaatttaggggatgagaaaatttgatattccatgcaaattaaaacaaaaaaacaacatggataactatccttatatcaggcaaaatataccttaagataaaactctaacaggtgataaagatggtcactatataatgataaagggatgagttgattaaagggatgaaacaattataaataaatatgcacttaacattagagcacttgaaaatgtaaagcaaacattaatatctggagggagagatacagagcaatcaataatactacagatataggtaaccttattgacactgttgaaattatcaatactccaattacaacaatggatagatcatttagacagacaatctgttaggaaaaaaaaattagacttgatctgcactttagaccaaacggacctaacagatgtatgttcacatttcatccacagccggagaacaggtgttcttttcaagctaacaagaaacatcctctaaaatagagcatacttgaagtcacaaaatgtcttaatacatttaagaagattgaaattttatcaagtatctcttttgaccacaatggtatacaactagaaatcaattaacaggaggaaaactggaaaattcaaaaagaagtgaacataacacaattcttaaaaactggtggtttaaaaaggaaataaaaaggaaaataaagaaatcttgatacaaaaatgaaaacacaatacaccaaagcttgtgggatgcagtaagacagtgctaagatgaaaatttgaaatgacaaacacctacattaaaaaaaacacaaatatttcaaataaacaatctatcattaaacctcaaggaactagaaaaaaagaagagcaaactaagcccaaagttaatagaagaaagaaaataagaaagatcaaagcaaaatagagaaatagagagtagaaaagtaatagaaattgaaagacattctgtgttcatcaatgtgagaaattaatattgtcaaaatgctattacacaaagcaatctacagattcaatgtaatccctatcaaaagtccaatggcatttttccagaaacagaaataaatcctaaaatttgtatgaaattacaaaagactataattacccaaactgatcttgagcaagacgaacaaagtaggaggtaccacacttctcactttcaagttatattactaaactacagtaatatatatatatatatatgatactggtatgaaaacagtcacatagaagaatggagcagaatagaaagcctacaccaatatcgtcaaagaatcttcaataacatgcccaaaacacctaatggagacaggatagtctcttcaataaatagcgttggaattattggaggcccacatgcaaaagaatgaaattggagtgttatkctatgcacaggaataaattgaaaattgaaaaggaatttaaacataacatctgaaaccaaagaatccctagaagaaaacaggggaaatcctccataacattgaccttggcatgatattttggctatgaatcccaatgtatagacaagataaacaaaaataaacacatacaactacatcaaactaaaagattgtggcacagtaaataaataaataaataaataaataaataaaaagtcacccatggaatggtagaatgtacttgaaaacaatatatctgataatgcattaatatctaaaacatataagaaactcataatcagaaaaaaagtaacctgattaaaacatgagcaagagacctgaatagacattttttcaaaggaagatttacacacggccaacacatgaatgaagaggtgcacaaaatcactaaacatgagggaaatataaactggaatcaaaatgagatgtcacattacatctttcaaaatagctaatatcaaaaaggcaaaagataaatagtgttgacaagaatgtgtcgaaaagagaacccttatagagttttggtgggaatgtaaattggtacaaccattatggaatacagcatggacactcctcaaataattaaagatgtaccgtatgttacagaaattatacttttaggcataaaagtatatacctgtgggtgtgttggctcacacctgtaatcccagcactttgagaggtgagggaggcagattacctgaggtcaggagttcacgaccagagtcgccaacatggcaaaaccgcatctctactaaaaaacacagaaattagcccagcgtggtggttggcacctgtaatcccagctacttgggaggctgtggcagggagaattgcttgaacttgggagacagaggttgccatgagtcaagattgcatcactgcactccagcatgggcatcagagtgagactccatctcaaaaaaagggtatataccttttatatacttttccttttatatacgatagaaataaaatcactatcttgaagagatatctgcattcctgtgttcattgcagctttattcacaaaaaccaaaatatggaaacaatctaagtgttgacagatgagtaggtatgtaaattatgatatctatcatctatctgtctatttatctatctatctatctacaacggaatattattccgtatttaaaagaatgaaattctgccatttccaacaaaatgaacgagcctagaggatattatgccaagtgaaataagccaggcagagaatgaaaaatactacaggtacaacaatgaaaacttgccattataagatgaataagttatggaggtctaatgcacaacagggtaaaaatagttagtaataatgtatgctttaagttcactgagtgtagatcttaactattaccctttcccaacacatgataactatgtgaagacatgaatatgttaattagcttgattgtgaaagtccttttaaaatatacttgatgggcgcagggtgagaggagagtgagggtcaaaacactacctgctggggactatgctcactagctgggtgatgaaatcatttgtacaccaaaccccagcaacatgcaattacccacgtaacaaacctgcccatgtacctcctgaacctaaaatagaagttgagaaaagaaaaaaaaagatatcaatttcctataaggagctccaggtttgttccaaacagtagcgagacaaacagatcaaggatgaaatatataaaatagtaggcaaaacgtaaacaacatgtgtaaggcaatcrattctatataactcagcaactcctagggttcttatcaaataaaatcactgatgtgtcataacttctaaactaaaaacaacacaaatgcccattcacagtagaatgaataaataaattacttttgcttcccgcgatgaataccacacagcaattaaacaatgaactgctgctacacaaaacatagatgattctcacaaatttcaactgagtgaaacaagtcagactcaaaagattacatacagcaagtttccatttatatgaaattgaggagtagggaaatccatcgtgatagatttcatgataatgatgaccattggtgagtaactggttgagaaagtgcgagagccaggggtgtgggagctggaaatcgtccatatcttgcttgatttgggtggtggtgatagggatatatacacttataaaaattataatgctatatgcttaagatttatgtattttactatttgtaagatatatattagttgaaaaaatgcttcagtgtaaaggaaaccagtaaaaatacgctacctacaattgtagcttttgtttatcaaaaaagcatttgagtagtctattgattggtaattagcaagtttatgttaagcagccttgtcctgaatactttttagtatgtaccattaagcatttgcctttctcaactagggctaattaaaaaaaactcaaaacctcacattgtacacgttgaatatatataattttaatttgtgaattataccaccataaaactaaaaatctaattaagttgagtttgaatacattttagggaaaatacgataaagaaaattaggagcttaagaatatgcatagataaaaaataaacttgatagaaatattatttatatattatatattatgtatatttatatatatttatatataatatataaataataatatatatataaataatactatatgtatttcagaaaatcatataaaaagctgtgctaaaattttccagagagagagtaaatagttctcctgtagtggattaaaatgagattagcattggagtactagcgtaatacaacagatagagtctgaagtcagatctcaaaaatacaatatatttgctaagtaatgcgagacaagctatttaaagtttttggacctaaatatccagtctgtaagtttgttggaaaaaataaatacgctaatagagaacttaacttacagggagtgctaaattattacctgttactggaaaacataatatcagtgacattaaaagcttgagtgttgtagaacaatattttgaaatatcattttttgaagttatatacatatttatattactttaataatttgcacaacataggaaggaaagcttgctttgcacaggcaacatttttgccaaataatctttaaatcatcatgaattctcaattagattaacaataataaaattttattgtagaagactattttttcattaatatagttgtacatgcacatagggtaaatgtaatattttgttacttgcctaagctttataatgatcaaatcaaagtaaccagggtgtccataatctcaagtattatttccatatgttaagaacatttcaagtcctttagctattttggaatatacaatacattgctgtttatatgtagtcaccttactctgctatgaaatattagaacatatgtcttccaagtaattgtatgtttggacctattaacaaacttttctttattcctcccacccagagaaactttccagcctctggtatctatctataattctattctctacctccatgagatcaatatttttagttttcatgtaagaataaggatatgtgatacttgtttttctgtgcctggcttatttcacccaacacaatgacttccagttccatccatcttgctgtaaatgataaaatctcattcttttttatggacaaaaagtattctactgtgtatatatataccatgttgtttttattcattcatccattgatggacagaggttgatttcatatctttgctattgtgaatattgcaataaatatgagagtgtggttatctctttgatatactcatttatttacctttggacaaatagctagtaataaatagcttgcacctctggtctcagctacttgggagactaaagcaaggggatcacttgagcccccgaggttgaggttgcagtgagccatgatcactccactgcattctagcttggttgacagagtragaacctctccctcctaaaaaartccttaagaaatgtgttgatgcctggttcccttggtcagaattttcatttgatgtgttgagagtgtagcacasatgttggaatgaacctctcaagctgattttaatgtgcaaccaagtttgagaaccaccaaggaagagtttttatgmattaagattcctatactctatcctagaactaatacaactgaatctctgggaatggagtatcagaatcagatttgaaaaggtttccttagtaattctaaggactgagcagtttggatactcgtttgttagagtaaaatggttaggtacctagtatcaacataggcacccaacctgatattaataactaggaaaataaagggttggcgcctctgtgtttctttgttgaaaaatctgatactattcttagttctatgaaaacaattgaaaatttggttattatcaccttaaaagtacaaaacctatagatattgaaaatgtaattatttttctataggcrtagttgaaatgattttgtaaatgttataaatcagtttctttataagcagttcatttacataaattttgttaaactgacatgattcactaattttctaaatataaatggttcagctctcagttatttttaaactaatgacctgtgttatacttactatttttaatgggcttttatgatgtttttaggtttctttggattcccatgtccttcaagtgctttgcaactttgagaagaagaaattgaccacctggactatggaactgtgcataacagctttgaaagtgtatttaaaaattaaatccatacgcctttaaatcagtaaattggaaatatattacatgtattgtaatgactttcctcagatataataaattgttttctttccaatggaatagtgtttgcattttttgtttacctggtttaagatgtgcagcagaacataactagatgattacataatttctttttaaggcaattttataatatattttatttatgattataaaaactgcctttaaaaattcttacatggatatcaatgcagtttcactttttttattgtaatcttttttataattattttatacttgtctggcattgagttttattgggcttttggttttttggaagtagggtatttatcccaatttagaaaatttgtatccttgccataatacagtcttcyatttttgtacccccaaatctttcatctgtcagaacatcactcaaaggtgaaaatatttcccacataaaattattctgttcctttaatgaaatgagtttcagctgtatataagtaggaaaacttccttttgttctatttgattcctttttacggatactttcttgaggctgtgattacacctttaccttagaggcactgcccaaaaagactcagctcttctgtaaaaatgctgttatgaatcatagcttcttaacttttacaacatagtgaggtagggaaagtaagaacactagagataggaattagaagcatggagaagtgaaccctggagcttcccaatggtgagataccaaatagttcaagaactagtraagaagactacggaggaatagctagaagctaaatgaagaragtatctcaaacaggaaggagtgatctgttaatgtgttaggaaagttgagttcttaggrttaagcattgggtagagcaagatttgggaccttgactttgacgaacttggtggatgtcaggagtaagaggaggtattcaagagaatgttggagaggaatttaatatagtgagtattgaggacaacacttaaggagtcttgctttcaaggggatgtgagaaatgggttgttaatggagggtaatgtagtatcaaaaagctgtttattttgagatcgatgatatagtaggtttgtatgctaatgggactgattcagtagacagaaaaagcataatgcaggaaacagagggatattgctgaagccatagacctgggacacaaatagaagggttagttttaaagataggcccacamacagctcattagtaacagcaggatgaagggcagattatggagttccagatgtttgtagtccagtagataggaggagcatgtcaaatttttgtgatattttctcagtgaaacaggaagcrmgctcataaagagggaggaagtcacgaaggagtaaggaaggaaaaggagatgtaaaatgaatagataggagtgtaggaaagtaagcatactcttaggaaatctgtggtttatttaagtggtatcagtcaatgtggttctgtgtttttctccagttgagttcagcataggtgctatcactgaaaaagtacagaattcagtttaactaaaggtgagatttctctaggtgaataaaacagtcagtgatgagatgttgatacatttaagagaatgattataaaagagggatgtggaaagtagtctgggttaagtagtgaagtgagaaaataaagaaggttgagacagtggaaaatggaatgatcaattgtagattgcagtgtggttgaagatgcaatggacttcttgaggtgggaactagaaatttgggggatataaataagagaggggtgactgaaattgaaaatatgagagtataatagtatacaatattactaagtatggtatactaagtatagtagaatagtactaagtatagtagaatagtactaagtatatagtacttagtgagtataagttttaggatgtgaagaggggagtagcgtagaggcaaggtgatggaagcagatgagttcaagaaaatgagaacctaggagattgaaaccattatctaaatgaattctgaaatctcaagaagaactgtgctgagtgcttgtagtcattattttgtctttactactctgtgagaagacagcacttccttttgtgagtaatggaaagttctttaatatgtcaactgtaagatactttattacatttaattatctttagtaatgcatagtaataactaatgacctcagtaggattattcagtagatatgtgagctaaccccctgtgtcagacacctaagaggaacaactgatgtttttcaagacgaatagagggttctcatcccagggttttaagctgcaaaatatcccaccctatattttctgaaaacaaacgttatatagagtgtccacataaaagctaacaggaaatattacacacacacacacacacacacacacacacacacacacacagcattgaaaatgcatcaggaaagatataccctgtacccaacatgcacraggtctaagcaatgaagaaaatctaggaaatcaaataagaccagaacatctatgactaatatataaatacttgaggcagttatatccatttaaaaggtgtcaattagacatgaaagaaaaaggccaggtgcagtggctcatgcttgtaatcccagcactttgggaggccaacgcaggcggatcaacgtgaggtcaggggtttgagaccagcttggccaacaaggtgagaccccgtctctactaaaaatacaaaaaaaattgctggttatggttgcacgtgcctgtggtcccatctacttaggaggctgaggtaggagaatcatctgaacccagaggtagagattgcagtgagctgagattgcgccattgcactccagcttgggtgatggagtaagattaaaatatatatatatacatttttacataagaaattttattttaatttttttgtaaattagaaaatagcaattaatatggtatttrtataccagaatctttgaatatctaaaatttaagaagatgtgagcaatttcatgaaacttttcaaagcttagaaaaaggtagctatgtaaaataacaatgtatgttgtttatgggaacattagatgaagtaagtcatgaaaacatgcatagaaatgatcatataaacttgcaagaaattgaatgtcttgctatcaaaggaaaggatggaggtgtaagagactgaggtagaaygtgagaagctctgtatatattgtattttccttaaaaatatatatttaaactcgcatttcttgtttttcaaatgttcactctaatgaaaattcttttatttttcctgttacagtttttatttctgatctcatatatgcagtgtactgttgttcagaaatatcattgatcctccctgcaaatgaaatactctcatcctgttgaatttgagaatgtacacatgatttgctttggctttgaaatgtgagcagaaagaatgttttactttggggagttcccaattgctaaaccatgtgtcaaaatgaagtttttgtgacattacaaatggactaataagagtgcctttgttgatcctagttgaacatgagaaacttggttattgtaagccactgaaaaattttagtttcttttattactgcagaatagcctattctgtcctgattgatacagccacaacatttccttaagctctttgattttcatattgccattaggatgtagaatgccaagagaaggataaatcataggatcagagaatgttagcagtgaacgagactattggaatacattttttcaatggtttccagactttgggttctaagtaatcagtaatatttcgaaaaagtagtaaaagatatttcaatataaaaaataatgacatttaactttgaaaaaaaaaacctatcattgctaggcataatgggtctagcttgtaatcccaacaacttgggaggctgaggagggaggatcacttaaagtccaggagtttgaggctgcagtgaaccatgattgcatctccacactccagcctgggtgacatagggccacctcaacaacmaccaccaccaaagctatcattaatacattgttcctctgtctctcttcccatcctccttaccacttagtcttaaatctaatcttattaaacaatatctaaggaaaagataagaaaaatgatggttgcatctatactgaacatgtgttgacttttttcttgtcactattttctaaacaacacagtatcacaacttttgacatagcatttatgttgcattagttattataagtaatctgagatgatgtaaaggttatatgcaaatattatattttatataaaggacttgagtaattattactttaagtatccatggtggttcctggaacaaattcctcatggatatggagggaggaggaatcactgtarttaaacaaatcatcactttaaaacttaaaacyttttgcatgttgaatacagtcatgcaccacataaatgatggtggtcccattaagtttattatgccatatttttatcggaagtttcmtatgtttaagtgtatttagatacacaagtacactgtgttacagttgcctatagtattcagtaaaataacatgctttacaggtttgtagtctaggagaaataggctaagccatctaggttaatgaagtccattctatgacatttgcacagtggcttaattacctaagggctttctcttcagaacctactcttgtcattaagcaatgcatgactgtagttggacaaaaaataataatgcaggcatacctttggcactgtcctaattcttaccagcatccatgattgcttaaatttgcactggaaagacttcaaaaaacagtgatatattaggacaatatatttccagtacatgacaaatgataacaacataagaactcgamacactcaataaaamacaaaaaataaagcaaawctagatgggaaaaggaagaagcaaatttcaagagaaaactcaaaaggccaaaaaatgtgaaatgatgttcagccttgctagtaattgggaaaaacacaaatcatttttttttttttttttttgagatggagtctccctctgtcacccacgctggagtgcattggygtgatctgggctcactgccagctccacctaccaccttcaggccrccattcccctgcctcaggctccagagtagctgggactacaggggcccaccaccatgcctggctagttttttgtgtttttagtagagacagggtttcaccatgttagccaggatggtctccgtctcctgacctcgtgatctgcccgcctcagcttccgaaagtgctgggattacaggagtgagacacgtgcccgacccaaatcatttttaatctattagtcaaaaattagagctatgataatattaatttttggkgggagtgtggcaaaaggtactataatatactgctactagagagtaaaaattgataaattttgtaagggcaattttgcacaatatgaaaatataaaaatatgcttcatgtttaccatacatttatctagcatacasaattacccatgtgtaaacatgtrtacagatgttcattataacacttcttataaaaacaaaatatttggaaataaatgttcatattaataaggcgcataccgtatgatcttagtccagttagaatattctgttttatttcaatcctttaaaagactcaacttctgactctatatagacgattaaaaaaagaatgtgttctccctttgtgcatttggtcaggtaaattaaaaaatacaccacatgctagccgcaccaaactggaataagcctttggaaagaagttgtccttgaagcttgtatctgacattgtagcaggacgagcctcagacaaaacctctcagacactgagttgtagaaggaagggctttattcagctgggagcatcggccagctactgtctcaaaatctgagctcccggagtgcacaatttctgtcctttttaagggctcacaacactaaagatttcacatgaaagggtcgtgattgatttgagcaagcaagggatacgtgacaaggactacattcactgctggtcagggagaaacagaacagggcagggagtttcacagagttcttttatacaatgtctggaatctgtgaataatatcagcttctaaatcataagttgatttttagctactgggtttaggccaatcaggcccaggcctggtttcaggcctggcgctgggctgcatgtctttggttgtacttcctggttgtttttactgaatagaaaacaatataaaacaaggagagggtctttgtctcctctcaatatcagcactggattgtagaatgtgttgctgattttgaccttgtattcaagttaactgttgcccttggtatctgtacatatctttgatttcagtctttactacacgtggcttggtcacttcatggctaaaaacatgcttgtggaagaccagtctggctcggtgagtctgtgcggccagcagtctctgatctgtacagggtattaatgtgtcagggctgagtgttctgggatttgtctagaggctggtaagggcttctggaccacttgtttctgtcctgtcagtctgtcagggttggaaagtccaagccataggacccagtttcctttcttagcttacgttatctaccagagcaccgtgggctgttacttaccttgagttggaaggggttcgcatttatacctgtaaaagtattcatccttttaatttatgtaaagwttttttgtatgccattctggatctttaaagagatgacaacaaattttggttttctactgttatgtgagaacattaggccccagcaacaggtcactgtktaaggaaaaataaaagtgctgccagaacctaagaaaaacattaatatctaaaaggtcatttagatgatttccatgagagactttttgatgttctttacctgttaggattattatkgataatccttttcagattatgaataaacagtttgccctcaagtatttattcatgctaatatttactttgtaaaatgtgcttcttacaggaatataaatagtttctggaaaggacactgacaacttcaaagcaaaatgaagttctttctgttgcttttcaccattgggttctgctgggctcagtattccccaaatacacaacaaggacggacatctattgttcatctgtttgaatggcgatgggttgatattgctcttgaatgtgagcgatatttagctccgaagggatttggaggggttcaggtgggtatgattcatagtatcaattgcggaattcactgtgcttgtaggaaatagtattctgatcttatctgtgaagcttgggcaacattttacttcacaggtaagtattctaagtaaaagagatttctgagggaaaatctatgtagtattcttggcaactttatattttgtttctgagataatctttcttcaccaagagccctccaatgtgctgttaatattttcaagagatagctgcctataccaagattcaagaatcttttatactattgattagtttctagaacattcaatgatacacagtaagacagaatttggtacttatgaagactgtttaatttgtaggtctctccaccaaatgaaaatgttgcaatttacaaccctttcagaccttggtgggaaagataccaaccagttagctataaattatgcacaagatctggaaatgaagatgaatttagaaacatggtgactagatgtaacaatgttggggtaagtgaattctagtttcctttaaaaataacagacaggaaaatggtttctctctcttctttcttgctccttttcagcagaaaattttccgtattttatttttttaattttacttcataatttaaaactcaaaattaactgtttatttatgttcaacttttgtgaatatttgtgtgtgtgctatctactaaagaggtaagttaaagtttaaatcagaatttgcttctaaagcaaaacatcaaattttaacccttataactgttcgtatttcccggaaacaatttactggttaggaagtataattccagttacaatgtttgctatcatttttaggtgacttgtgtctccatccgtaattcttgggtttttcatggtgaatagctagcttctctatttaatgaggagcataaattgagattaatagctaccttgtttgtcttcaaaagcttcatagagagtacaggctttctcctggtgacccactgaaatttccaaaacaataacctttccactctcatctgagttttgtcttcccaaagtgggctttttgcatttcctcctatttatggtagtttctggtctctcaatttatcattcctataaatatttgaccaagtgtctagaaggcatgtaggtgtttagttcacattactttcctttcacagttgatttttgatcttgtaggaaaataattataagatatcatgaaatattttggagttttattmacatactataaacttgcatcaataatgctttaaatttcyacctctctgtaagtcacactgaagtagaaactytgttttctaggtkcgtatttatgtggatgctgtaattaatcatatgtgtggtaaygctgtgagtgcaggaacaagcagtacctgtggaagttacttcaaccctggaagtagggactttccagcagtcccatattctggatgggatttcaatgatggtaaatgtaaaactggaagtggagatatcgagaactacaatgatgctactcaggtaatttttttacgagagtgatctgaataaaagagtaatatatgccttttcttgtagacatgtagctaattgaatttcatttaaaataggaatttagatctcttagggacagaagttaacaagtttgactactttaagaaactcaaatccatatttaagaactttcaaatattgatttaagatttttaatcaatacacatttgcccacttctaagaagttcccaattaaaaatctcatcgactttatttcctaaattctctattttctattagaaaatatttcaaagatacatctgtagtagaatgtgagcatccccagtgcccaatgcaaggaagtcactatagaatatctcttgaggaatcatggaataaatgaataatccaatggattctcaggagaaaaatgaggttttatgaatcaatcataacatttttacctcaacaggtcagagattgtcgtctgactggtcttcttgatcttgcactggagaargattacgtgcgttcyaagattgccgaatatatgaaycatctcattgacattggtgttgcagggttcagacttgatgcttccaagcwcatgtggcctggagacataaaggcaattttggacaaactgcataatctaaacagtaactggttccctgcaggaagtaaacctttcatttaccaggaggtacatcaatacttatatgcctataaaatatcatcttattcgttagaaaattaatggaagatttaattaaaaatgcaatttctgtaggataaggaatgagacatttacataaaacataatggttgtaccaatttacattcccaccaaaacagtgttctttaacctcctcttcttcacatacagcatatctaattctttatcacaacatgttttatggaggtacacagaatgtaggatactgataatagttatgtctttactttctttggataatgaaacaagttaatatttatcaaggaatttcagtcgatactaaatgttttattagtgtgagctcttattattatcattgatgtagaagactaaaaattaggtaagtattttcacaggacaacaggtatctttgacattatgcttctttcaatattgtagcctatactttatcaaataaaagaatataagaatattacctgttgagataataggaataagaaaaccattttgcacatttcgtgtaacaaacaggaccaggcatggtggctcgtgcatgtaatctcagcactttgggaggctgcggcagggggattgcttgaggccaggagtttgggaccatcctggacgacatagcaagaccctgtct

SEQ ID NO: 94404 - DNA, 13077 bp, Homo sapiens
aggtgcacagaggtgcccaggctccatgcttccttgcaagcctggtggcagcagtggtagataatatctataattcagatagttttgtggtagaaaaaaaaaaactgacctgtttattagcaattactctaatacaattaaacacaatgttccttatggccatctgctaaaatatcattattgtaaaatattttaaaattttgttttatcacgtaattrttcaaacagttcttaagtattagagatatattaaaatatcttcaaatttaaaaaaataaaaatatggccgggcgcagtggctcacgcctgtaacgccagcactttaggagaccaaggcgggcggatcatgaggttaggagttcaagaccatctggccaacatagtgaaaccccgtctctactaaaaatacaaaaaattagccgggtatggtggctaatatccccatatccgctacagtggaccaagctaaaattatcattcaattcttacccttatcatgtcatatgtattacatgtagagatgtttgtatattactacatataatattttatcaagaatttattatgtttttctgtgagtgtattagttccaccagttattccacccttacttgaagacagaaactgaatgttgttcgctttttgaagttttaataaatgggattagatagtatgcatatttttaatctggttgaatttatgcaacattatatttgtgatgtttatccatctcattacatgtacatataatttgttcattattcagcaataatacatttggtaatatgatataaaaataaaaatgtctgaagctatagttattctttaactttttttttttttttttttttttgatgagtactgagaccagacaatgcacctgagcaatgttactgaagaaaatgagctcactcattaccaagtttaggacccagctgctgctactctacttttccaggaattaggtaagttcagattttgctttggtgactctcatttctaccaatcccagagcctagtgtcttacttctacaggtgacatgacagtaataaatccagagggaaatgaaatgatagcatttattctttatacccatgtctcagggacaaaaattcatatacacagaatgactccaagacaaaccttggtatctgtttcttagcttcattactgatgagtactcaagtctcaggtggaaagttggaggaggcagaattttatcaatgaggtctataatttttgcatgattttgctcttgtgtctcactgaattataactaactggtaggtgtttctacataccatatattatgaacacataaacatatttgtaagaaaatgtgtgattttttaaatgttatactctaattgcagttttactcgactatttctcattttacaacaaattgttcacttatgacattttttatcttgacactaaatatgaactaatttataatgatttaatcatattttaattttaatttaatttaatttaatttttatttgtttgagacaaagtctcccactgtcacctgggccggagtgcaaatggcacaatctcagctcactgtaacctctgcctcccaggttcaagagattctcctgcctcagcctccccagtagctgggactacaggcacctgccaccacacccagccaattttttgtatttttagtagagacggggtttcgctatgttggtcagactggtctcaaactcctaacaacaggattaggtttattctgccttggcagggtggtcctgagagtcgtaggtgccaccctgtcctggactaagggaggcccagagggccagttaaggccaatggtaggcgaaggtgggggtgcagccccttgaatgaggtgaaaacaggccaaggccaggaggcagctgtggtaggctggggcagggtggaaggcactggactgggacctagtcagacctacaaagccaaggacccaggccacatgagtacccccggcaggcgaggcacagtgtcagatgacacagaacatgaaacacaggcccaggctcacagtaagcacatggacaagtgggcgcagattcacaggccagatgaacagccagccatggctgggccagacctgtggacacagtggtggcttcacacacagaccacagggaagacatggctctatgtgacacagtgacttgacgccacaatgcacagagcaggccgcagagctcaagggatgtgggaaggggccttttggcccttctgccctggaatcctgtgagacaggggtggcagccactctgcaggtgcctggagtgtcccctcgcagcccctctgggcttagtccttcttccacactttgttgagcagcttcaccacctcattgtagatgataaatgttatggccacatccaggcagactccgtcagtgactggcatgggacagtgcccttgtgaaggccttgagcccctcgggatcccgtccagaggggtgtttccgaagacgctggctgtgcctgcaatggctcagaagaccccagtgatcagcgggttcatgggcttatctgtttggtaccagttgctgcagggaggtcaggacaaagaaacaatggcctggttccagccctgcttcagcccggcggccctgaggccctggtaagtcccctcagcccttgttcccgcataatctccctaaccccgaagaattatctgttcttgggtttggggaggtctggtagtggatgaacttcactttgatggtctccatgggacgtacgaccaccatggcctcggccatgccggtgtctagacctcacagcagcccgcgcctgctgttcagcagtccctgggcattccacatctgggtgcagaggaactccaacttcccgaacctgactctgcctcggggatggagccgcagagcaggaagctgaggccgcggttcaggcccaggacgccgtggctgtgactgtgccccacaggcccccatgccgggtgcccggcgggggcgagcgctcgttggtcctcacgtgctcggtgggaaacggaatacaggtgtggatgctgccgtccaggccacctgccgtgatcgccttccccgggagagtcccctcggccttccagaacgctgcgctgccatggtgggcgggaggggtgacgcccggcatcgccttggtctgagcctcctgaactccccgctctgaccttaatttggttttgacacaaataaagatctcacataaacataaaatgggatgtcttggcttgtaatttttattgaaagcaatagtattgttgtataggatagtgtattggggtaaataggttttttatttttattgttttcatcagctcactgacattgatcgagggcagtttttaggttattgatgagcagttttcccttaggtatgccttaaggtaggggtttctggtaatgtttgagaggtaggctgggattagagtttgttacggcagcaatatccttctgagaaccagggaattcaaatccttctcatgatactttgctaatatcgcccaggtttactgtgcctttcctttgtgcagcttaccagagatggtctcttgcacttggcccagctataatatgttccactgttctttttattccgtgcttcttagcctggtggcaggggtgagggaatgaggagatatctgatgttctgaggaagcctcacactcagcactgtgaactggggtgtggggttaccgaccttcaaagtttcctgcccctcctgtagatgcaatgccagaacaagagtacattcctgtccctcccccagtggtagagaggctccttgtccacgttcctagcttctagttgaagtgtgagtgggtctgcaacagtgccctgtaaactaatgctttagtttctttatgggagatgtatctgggcagagatgtgggtgttgaccttgtttctccaccatcagctgcagtgagttttttcacagttccctctggttcaagtttggatgctctttccccggccttgtgttctatagcagagatgggaaagctatgtctccagagttgtagcagtgggtgggatagtggtccctccctatcagcaccatgggggaagcattctcaggattataccccaccctccctgacaggccttgtagggttcctagaaaaatcatacacaaaggtgtaaactctatgtctgtagactccaggatttctcattccccttcacccacccacccacccacccacacacagccaccaggaactagttcaaaagtcctgctttaattttgctagtttccatggtcttccaggtatacataaaagcctggggcctgtgtgacctgcaggctcctgcatgccttgatgttgggtttgttgtctcctctgtgacctcaattctccaaagggctcggaacaagccattcattcatttgcattttctccagcttttttgtttgtttaatgtaggagcaactctttgtcaggtctctacagctataaacttaactcagagactaatatttctaaatacatttatttcctatcatactttcagtgttgctctacctaacctaattgttcttcagtatttttcttatttgtatgtctttattttaaaaccaggtttaattccttcttaaactaatttgtaacttttctattttcttccatttcatttatttccctctgtgactttgattcttttcagacatttaaagcattgatgcataattccagtgtaggaagtcagattatacactgacatttctccttgaccactggttataacacttcagccctgatgacagttatacctgaagccacatccactcttgacatgtatttattttactattcaataaaaattaagtcatcatgaactgtattttattaatatttgtaggctttatggacctgaaaatacaacaaataaaaaccaaattacatgacaccaggggttaaaatttttttggttgattaaaacatttttgtctttctgtgatttgagtgatctttgtaataggaaccagagttgaaactaaagtaagtaggtgttggtgagatttgatggctaagaacatggagctcattttgtaattgaaagggaaataagaacacgtgtcaccagttccatatgatcacaatgcatgtggaataatcaaaatggcaacaagcgacttatattttgagagagaagaattggaactaaaatgaccaagtataaagctgagccaagggccggcacagtggttcatgcctgtaatctcagcacgttgggaggccgagacaggcagatcacctgaggtcaggcaagaccagcgtagccaatatggtgaaacccaatctctactaaaaatacaaaaaattagccaggcatggtggtgggcgcctgtaatcccagctacttgagaggctgaggcgggagaatcgcttgaatctgggaggcggaggttgcagtgaaccaagattgtgccactgcactccagcctgggagacagggtgagactcagtctcaaaagataaatgaatgaaggaatgaatgaatgaatgaatgaataaagctgacccagtctgacttggatctttgtctttaacatatatctgcaatactcatgtaggcagtgtataaataacttgtcagcaatattattaatgcccaggttcttgaattttcagggtttggtttctccagtagtgagtgtgttactgagcaaaaggggcttgcaatgcactaaagtcaatactatgacattaaatttttcttttattattattattattattattatacttcaagttttagggtacatgtgcataacgtgcaggtttgttacatatgtatacatgtgccatgttggtgtgctgcacccattaacgcgtcatttagcattaggtatatctcctaatgctatccctcccctctcccccctccccccaccccacaacagtctccggtgtgtgatgttccccttcctgtgtccatgtgttctcattgttcaattcccacctatgagtcagaacatgcgggcgggccgcgcggtgggcgcggagaggagcggagcggcgcggcaggccgggcgggttgcggcagtagcggaggaggccgcagctgcgagtcccaggagcggaggcgacgcgggcggcggctgggggccgggtggccggggtcccgggccccgcggcggcagcggtaggatgatcaagctgttctcgctgaagcagcagaagaaggaggagtagtcggcgggcggcaccaagcgcagcagcaagaaggcgtcggcggcgcagctgcggatccagaaggacataaacgagctgaacctgcccaagacgtgtgatatcagcttctcagatccagacgacctcctcaacttcaagttggtcatctgtcctgatgagggcttctacaagagtgggaagtttgtgttcagttttaaggtgggccagggttacccgcatgatccccccaaggtgaagtgtgagacaatggtctatcaccccaacattgaaatcgagggcaacgtctgcctcaacatcctcagagagaactggaagccagtccttacgataaactccataatttatggcctgcagtatctctacttggagcccaaccccgaggacccactgaacaagaaggccgcagaggtcctgcagaacaaccggcagctgttggagcagaacgtgcagccatccatgcgggatggctacataggctccacctacttcgagcgctgcctgaaatagggttggcgcatacccacccccgccacggccgcaagccctggcatcccctgcaaatatttattgggggccatcrgtaggggtttggggggcggccggtgggggaatcccctgccttggccttgcctccccttcctgccacgtgcccctagttattttttattaacaccatgtgattaaggtcagcgctgcctcccccgacccactcagcgatgggaaatgaattggctgttctagcccccctgctgggtgcttgttcagccaaagggcctgggtagctgggcccagacaaaccacccctccacctctggaggtcccaccaggctattaaaggggaatgttactgcaaaaaaaaaaaaaaaaatgcggtgtttggttttttgtccttgtgatagtttgctgggaatgacggtttccagtttcatccatgtccctacaaaggacatgaactcatcatttttatggctgcatagtattccatggtgtatatgtgccacattttcttaatccagtctatcattgttggacatttgggttgggtccaagtctttgctattgtgaatagtgccgctataaatatacgtgtgtaggtgtctttacagcagcatgatttataatcctttgggtatatacccagtaatgggatggctgggtcaaatggtatttctagttctagatccctgaggaattgccacactgacttccacaatggttgaactagttcacagtcccaccaacagtgtaaaagtgttcctatttctccacatcctctccagcacctgttgtttcctgatttttaatgatcgccattctaactggtgtgaggtggtatctcattgtggttttgatttgcatttctctgatggccagggatgatgagcattctttcaagtggtttttggctgcataaatgtcttcttttgagaagtgtctgttcatatccttcgcccatttttgatgggattgtttgtttttttcttgtaaatttgtttgagttcatcatagattgtggatattagccctttgtcagataagtaggttgcaaaaattttctcccattctgtaggttgcctgttcatgctgatggtggtttcttttgctgtgcagaagctctttagtttaattagatcccatttgtcaattttggcttttattgccattgcttttggtattttagccatgaagtccttgaccatgcctatgtcctgaatggtattgcctaggttttcttctaggattttcatggttttaggtctaacatgtaagtctttaattcatcttgaattaatctttgtataaggtgtaaggaagggatccagtttcagctttctacatatggctagccagttttcccagcactatttattaaatagggaatcctttccccattgcttgtttttctcaggtttgtcaaagatcagatagttgtagacatgcggcgttatttctgagggctctgttctgttccattggtctatatctctgttttggtaccagtaccatgctgttttggttactgtagccttgtagtatagtttgaagtcagctactgtgatgcctctagctttgttcttttggcttaggattgacttggcaatgcgggctcttttttggttccttatgaactttacagtagttttttccaattctgtgaagaaagtcattggtagcttgattgggatggcattgaatctataaattaccttgggcagtatggccatttttgcgatgttgattcttcctacccatgagcatggaatgttcttccacttgtttgtatcccctttaatttcattgagcagtggtttgtagttctccttgaagaggtccttcactcccttgtaagttggattcctaggtattttattctctttcaagcaattgtgaatgggagttcacttatggtttggctctctgtttgtctgttattggtgtataagaatgcttctgatttttgcaccttgattttgtatcctgagactttgctgaagttgcttatcagcttaaggagattttgggctgagacgatggggttttctaggtatacaatcatgtcatctgcaaacagggacaatttgacttcctcttttcctaattgaatgccctttatttccttctcctgcctgattgccctggccagaacttccaacactatgttgaataggagtggtgagagagggcatccctgtcttgtgccagttttcaaagggaatgcttccagtttgtgtccattcagtgtgatattggctgtgggtttgtcataggtagctcttattattttgagatacgtcccatcaatacctaatttattgagagtttttagcatgaagggttgttgaattttgtcaaaggccttttctgtatctattgagataatcatgtggtttttgtctttggttctgtttatatgctggattacgtttattgattttcgtatgttgtaccagccttgcatcccagggatgaagcccacttgatcatggtggataagctttttgatgtgctgctggattaggtttgccagtattttactgaggatttttgcatcagtgttcatcaaggatattggtctaaaattctctttttttggttgtgtctgtgcccggctttggtatcaggatgatgctggcctcataaaatgagttagggaggattccctctttttctattcattggaatagtttcagaaggaatgttaccagctcctccttgtacctctggtagaattcggctgtaaatccatctggtcctggacttttttttggtttctaagctactaattattgcctcaatttcagatcctgttattggtctattcagagattcaacttcttcctggtttagtcttgggagagtgtatgtgtcaaggaatttatccaattcttccagatattctagtttatttgcgtagaggtgtgtatagtattctctgatggtagtttgtatttctgtgggatcagtggtgatatcccctttgtcattttttattgcatctatttgattcttctctcttttcttctttattaggcttgctagcagtctatcaattttgttgatcttttcaaaaaaccagctcctttattcattgatttttgaagggttgtttgtgtctctatttccttccgttctgctctaagcttagttatttcttgccttctgctagcttttgaatgtgtttgctcttgcttccctagttcttttaattttgttgttaggatgtcaattttagatctttcccgctttctcttgtgggcatttagtgctataagtttccctctacacactgctttgaatgtgtcccagagattctggtatgttgtgtcgttgttctcgctggtttcaaagaacatctttatttctgccttcatttcgttatggacccagtagtcattcaggagcaggtttttcagtttccatgtagttgaacggttttgagtttcttaatgctgagttctagtttcattgcactgtggtctgagagacagtttgttataatttctgttcttttttttcttatttatttatttatttattattatactttaagttttagggtacatgtgcacaatgtgcaggttagttacatatgcatacatgtgccatgctggtgcactgcacccactaactcgtcatcgagcattaggtatatctcccaatgctacccctcccccctccccgctccccccaccccacaacagtccccagagtgtgatattccccttcctgtgtccatgtgttctcattgttcaattcccacctatgaatgagaatatgcagtgtttggttgtttgttcttgcgatagtttactgagaatgatgatttccaatttcatccatgtccctacaaaggacatgaactcatcattttttatggctgcatagtattccatggtgtatatgtgccacattttcttaatacagtctatcaatattggacatttcggttggttccaagtctttgctattgtgaatagtgccgcaataaacatacgtgtgcgtgtgtctttatagcagcatgatttatagtcctttgggtatatacccagtaatgggatggctgagtcaaatggtatttctagttctagatccctgaggaattgccacactgatttccacaatggttgaactagtttacagtcccaccaacagtgtaaaagtgttcctatttctccacatcctctccagcacctgttgtttcctgactttttaatgattgccattctaactggtgtgagatggtatctcattgtggtttcgatttgtatttttctgatggccagtgatggtgagcattttctcatgtgttttttggctgcataaatgtcttcttttgtgaagtttctgttcatgtcctttgcccactatttgatggggttgtttgtttttttcttgtaaatttgtttgagttcattatagattctggatattagccctttgtcagatgactaggttgcgaaaattttctcccattttgtaggttgcctgttcactctgacggtagtttcttttgctgtgcagaagctctttagtgtaactagatcccatttgtcaactttggcttttgttgccattgcttttggtgttttagacgtgaagtccttgcccatgcctatgtcctgaatggtaatgcctagggtttttatggttttaggtctaatgtttaagtctttaatccatctggaattgatttttgtataaggtgtaaggaagggatacagtttcagctttctacatatggctagccagttttcccagcaccatttattaaatagggaatcctttccccattgcttgttttcgtcaggtttgtcaaatatcagatagttgtagatatgtggcgttatttctgagggctctattctgttccattgatctatatctctgttttggtcccactaccatgctgttttggttactgtagccttgtagtatagtttgaagtcaggtagtgtgatgcctccagctttgttcttttggcttacgattgacttggcaatgcgggctcttttttggttccatatgaagtttaaagcagttttttccaattctgtgaagaaagtcattggtagcttgatggggatggcattgaatctgtaaattaccttgggcagtatggccattttcactatattgattcttcctacccatgagcatggaatgttcttccatttgtttgtatcctcttttatttcattgagcagtggtttgtagttctccttgaagaggtccttcacatcccttgtaagttggattcctaggtattttattctctttgaagcaattgtgaatgggagttcactcatgatttggctctctgtttgtctgttgttggtgtataagaatgcttgtgatttttgtacaatgattttgtatcctgagactttgctgaagttgcttatcagcttaaggagattttgggctgagacaatggggttttctagatatacaatcatgtcgtctgcaaacagggacaatttgacttcctcttttcctaatcgaataccctttatttccttctcctgcctaattgccctggccagaacttccaacactatgttgaataggagtggtgagagagggcatccctgtcttgtgccagttttcaaagggaatgcttccagtttttgcccattcaatatgatattggctgtgggtttgtcatagatagctcttaatattttgagattcatcccatcaatacctaatttattgagagtttttagcatgaagtgttgttgaattttgtcaaaggccttttctgcatctattgagataatcatgtggcttttgtctttggttctgttatatgctggattacatttgttgctttgcgtatattgaaccagccttgcatcccagggatgaagcccacttgatcatggtggataagctttttgatgtgctgctggattcggtttgccagtattttactgaggatttttgcatcagtgttcatcaaggatattggtctaaaattctctttttttggttgtgtctgtgcccggctttggtatcaggatgatgctggcctcataaaatgagttagggaggattccctctttttctattcattggaatagtttcagaaggaatgttaccagctcctccttgtacctctggtagaaatcagctgtgaatccatgtggtcctggactctttttcattggtaaggtattgattatagccacaatttcagagcctgttattggtctattcagagattcaacttcttcctggtttagttttgggagagtgtatgtgtcgaggaatttatccatttcttctacattttctagtttacttgcgtagaggtgtttgtagtattctctgatggtagtttgtatttctgtgggatc

SEQ ID NO: 94405 - DNA, 25833 bp, Homo sapiens
acacacacacacacacacacaccctgctggttgtttctctggagaaccctaatacaaataatagcctcagggctcatccatgtcgtagcatgtgtcagaacttccttccaagactgaatcatattccattgtatgtatataccacactttatgcacttatctgtcaatagacacttgggttgcttctaccttttggctgttgcaaataatgttgttataaacacaggtgtgcaaaaatgtcaagacactgcttttacttctgttgtttacaaacccagatgtgaaattgttggatcatatggtaattctatttttaatttttttccatagtgactaccccattttacattcccaccagccatgtacaaaagttctaatttctctatatccttgccatcatttattttttgttttgctccttttgggttgaggttttttctttcttctttttttttgagacagggtcttgctctgtcacccaggctggagtgcagtggtgcaattatagctcactacagccttgaactcccgggctcacacaatcctcctacctcagccttttgggtagctgggactacaggtgtgtgccacgattcccccctaatatttttttaaattttttgcagagatctggtctcactatgttacacaggatggtcttgaacacctgccctcaagttatcctctcgcttcagcttcccaaagtgctggaattgcaagcataagccactgtgcctggctgtgtgtgtgtgtgtgtgtgtgtgtgtaatagtagccatccccatggattgcagtggtacctcatcgtggctttgagttgcattttcccagtgactgggatgtcgagcatcttttcatgtgcctgtgggccatttgcacatcttttacggagaaatatctatttaagtattttgccaatttttttaatcagattgttttcatgttgctgagatatagaagttctttatatattctggttattaaccccttatcagatagatgatttacaaatacttgctcccattctgtaggttgccttttcactctgttgatcctgcccttcaatgcacagaagttgtaacttttgttgttgtccaattcatctatttttatgttattttacaaatctctcaactcatcaccaatttttttgttgcctgtgctttttggtgtcatagccaaggaatcattgccaaatgcaatgtcataaagcttttcccctctgttttcttctaccagttttatagttttatagcttttaactttaatttttaattttaacttcattttaactttagaaaatccatcttaagttaatttggatatattgtataagacaaggatcctacttcattcttttatatgtggatacctccttccttttggaaacttttcctttcagtaatcttactacctccacagctttagtttagatgtttttttttgttgttgttgtttcccaggggtgatcaaatccatatatccagcttttaccaccttcctgagttctagtccccccattttcaaacaccactgaaaatttagtttgactaagtacatcaacctattatgtgaagaaacaccatgtcccacccccactacggtgtggcttaatgagctaaagtaatatatcaagatagacataataatccaagaaactggggttcagagaagtaaatattattagggtgcatcttgcgctgttccagagtgaggcatatagggttttggggacagaacaatctagtctctgataatgttttctcttatagcacaggcacatttcatgagcctttcccactacctaggtgttccagtttggatgtggtttgtttggcctaagtctcatgttgaaatctgatttccagtgttggaggtggcgtctggtgggcaatgtttggaccatgggggtacatccctcatgaaaggcttgctgcccttatggcagaagtgactcagttctcactcttagttcccgagagaattgcttgttgaaaacaaacttgtacctcctacatgctctccttctagaagaggatctaaggaaatttataataaaagcagaggaacgctgaaaccaaacccaattcatatcagtaatagctaccatttgttaagcttccacaatgacaagtaagatgttaagccctttatgttaccaggattatctcatttatctcataagaattctagaacataggtcctattattatctttattttattcgtgagaaaagcagagactcagaaggcttaagtcataggccaaggtcatccagccagttgaatggtggagtggggaatatctggatccaggcagtcagactgtttttttttttttttttttttttgagacggagtctcgctctgtcacccaggctggagtgcagtgccgtgatctcggctcactgcaagctccgcctcccaggttcacgccattctcctgcctcagcctcccaagtagctgggactacaggcgcccaccaccacgcccggctaattttttttttttttgtatttttagtagagacggggtttcaccatgttagccaggatggtctcgatctccagacctcgtgatctgcccaccaggcagtcagactttattagaacatgcacttaaaattagcaagaaggaatgagaacaacaacaacaaaattaaaaaatgcttgccaaagaaaactaaaacaatgtgcaatatttagccctgagatcactagcagtgaaggcaaagacgaatgcataatgggtttctacagctctcactgtccggttatagaaaatatttctacattagtacaagcacttttcttcctaagccctgagttttgagagtttatcaagaaggcctctgagttcattcaattaatggcatcatctaaggctgtttaataacaaatgcagaggtagtccacataaggaacttttgcctttacctttgagacaaagcccagggcctcacgttaggagtacagctctctaaatataagcctccagggcagaagcgaggggaggatggagggacacaatgcagatttacagcctggtgggtacggcctttgtcctctccatgtctattgtcactcttgaggtcyaagcctctactgcactgcctggtttactgcacaacccaacttggctgcttgcttctggtctctccccaccaaaccatccttcacactgcttccagcttaatatttccaagacactgcatttgcaaatccactcctctgtttaaaaatgtttcagtgacttgcaacttgtctacagtgtgaagtataaatttattagcttgttgtttaaagccttctacaacgagaccccgaccgaccttcacgtcctattgagaggtgacagcctgctggcagccctcgcagccctggctcgctcttggcgcctcctcggccttggcacccactctggccgcgcttgaggagcccctcagcccgcagctgcactgtaggagcccctttctgggctggccaaggccggagccagctccctcagcttgcagggaggtgtggagggagaggcgcaggcgggaaccggggctgcgctcggcgcttgcgggccagcgcgagttcccggtgggcgtgggctcggcgggccccgcactcggagcrgccggcccgccagccccgggcagtgaggggtttagtacctgggccagcagctgccgtgctccatttctcgccgggccttagctgcctccccgcggggcagggctcgggacctgcagcccaccatgactgagcagcccgccatgactgagccgcctgccggcgccccagccatgggctcctatgcggccggagcctccccgacgagcgccgccccctaatccgcggtgcccagtcccatcaacccccaaagggctgaggagtgccggtgcacagcgcgggattggcaggcagctccacctgctgccccctgccgcatccacttggtgaagccagctgagttcctaagtctagtggggacttggagaacctttatgtctagctaagggattgtaaatacaccaatgggcactctgtatctagctcaaggtttgcaaacacaccaatcagcaccctgtgtctagctcagggtttgtgaatgaaccaatcggcactctgtatctagttaatctggtggggacttggagaacctttgtctagctaagggattgtgaatgcaccaatcggcactctgtatctagctcaaagtttgtaaatgcaccaatcagcactctgtgtctagctcacggtttgtaaatacaccaatcgacactctgtatctcgctaatctagtggtgacctggagaacttttgtgtctagctcagggattataaacgcaccaatcagcaccctgtcaaaacggatcaatcagctctctgtaaaacagaccaatcagctctctctaaaatggaccaatcagcaggatgtgggtggggccagagaagagaataaacacaggctgccctaagccagcagcggtaactcactaggattctcttaccacagtatggaagctttgttctttttgttttttaggtctgcactgcctttatgagctgtaacactcactgcaaatgtctgcagcttcactcctgaagctagtgagatgcacgaacccaccggggtgaactagcaactccagtacatgctgtcttaaaagctgtaacactcaggcaaaggtctgcagcttcactcctgagccagcaagaccacaaacccaccagaaggaaaaaactccgaacccatcggaacatctgagggaacaaactccagacacaccgcctttaaaaactaacaccgcgagggtctgcagcttcagtcttgcgttagtgagaccaagaacccatcaattctggacacactatcaactttgtttctccaagggtgcttcttaaactggatgatgcacaccctaggagtgtgtgtgtaggatggggtttgaagcagtagggtaaaaaacctagcatacattctattccagaggtgtcaatttaccagacaacagttattttaaaacttttttatgcaaaaacatgttatagagtggaatgcaacatttttatgggcctgtgggccatttgtatacatctttggagaaatggccatttaagtactctgcccattaattctaaacttaaaactaagacttcaaagtccctctaaggattttgctgggccacatcccaagaccctgaagggtattacttactcgccctctccaaactgccgaagtcggaagcaggtgacaaaaaagctgaccctggaatcaccttttgtaaatttcccacctccaagcttttcgatagtttgtaacactggctcctctccccaaaagcctttccttcaagtcccagcaactctccctgaccctgctgggaaggcgcaccaattacctgtcattccaggaaagctcatagcataagatgatcccattggtcatctcccagaaccagactttctgaaaagtcctcaaggaccagctagtccaatccctcactgaataaaggagaagcaaagtctagggaggtgaggtgattcgttgtcctcctaattagcaggtgagctcctggcaaggctggggtttcatcttctgggctctctgcaaggtcgtgcccggcacgggccaggaacaatttcataaactcgtcatctagacggcctttgactgacaccatctctccgtgtggaggagccgctggggtgcacggggcaggtgtcgtccgtttcaaaggtaaaataacccagctgcagacctccagaggccgactagagccggggtcagaaaacaggttttccctctcggggacagcgcccaggggaccggcattagaacatcggctgatgtttcatctggtcagggaaccatccagcgcttagtacacctggcgctaatcggcggggattaatctcacaccccgcagctggcggaaagcagcgggaggaggcacctagccctggggttgagatcccagttcccgcgtgcgcaaaccacgcccctgtagattctcgctgctgcgtgttcgcgcgcgtcccggagtgcgcatgcgcagcggcgggggttgttccggctgcctttcactgaggggacccgccagtttcaaactcagtggcgtttkccctgattcccggggcctggctttcagcgtagcaattctgccggcgaagaaggtgagcgcagtgctgtgtggcagcagagctccttaggacgaggagcagcgggacgaggaagggcagactggtgaaatcgcaaactgggcgtctgttccggcgccggacccctatttgcaaaggtgggtggcccgtccggagcgggaaaacattccggaagtggagggccgggccagcgtgattgacaagcgggaacccctgtgtggggacgggtaggcctaggaaggttgtgcctgcggtggaactgggcggtgcgcagaagtgggcattaacagcagccgcgtgtctgggtcttagatttggcccagctgtgttgagcttttcatggattatcttacgtagataagacactgcaacagtgagtgagcgcttgtaacccacctgtctcttacggaaactgagccccagcgatgctaactttagcaaggatacagctgggatcctaaacttggcaatcagagcccagagccgataaagttagctgcatgagtctagcttcccccagggcgggaatcgaggcggagcagggtacagtacggaggccaggaatgagtgcagttgaccagattgttgacgtaagtgtcataaaaatggacttaaatgctgataagcagctggttgggttccacacagggtgcgagctcaggatgcacgttggaggggacacagggccagagcaaggtgggaatgcgggtattatgggccaggccatcctccagctggtggagcaccgcagtactgcagtgtgtggccctggcttaacagcagtgcggaaaagcttttttcttggggctgtggtgctttccaggtgtgtgaagttaaaacattttagggccatacggtagatagtacctgccacatagttgtcttggtcagccccggctgycatgacaaaataccataaactgggtggcttagacacagaaatgtgttttctcacagtcccagaggcttgggatgtccargatcaatgtggggaggacacaactgagcccacaacaatagtctgtactcagtaatgagtgataattggggactgaagaaaatgaacacgttragaactaatatgttcctgaagtgctttcacaactctaacctcgttttatgagcgtgagctttgctgtcctggtgtgtgccttggcactgggaggtgatggttgtcctccacacagccaacctgaagagggctgaacaagtcactgcaaatgtttttaatagggcttagtgaatccgttatactcagatttatctaaacctctatgatttagcctgtgctgcttctggaataatgagatccataattaccactgatggggaagtgaaataatacttaacgtttcttctgtattgtttagtgttgtcattctagagtttggtcaccaagtctgtcttttttatcccacttaccctggtgggaggaaaagtgaggagatagaaagtttcaggtggcttgggggtctggcagatgtggttcaaatcctgagttcaagcacttgctgagtgaccttgggcaagtcatataagtttactgagtctcagtttctttctctataaaatagagcttataaaaataccacacagggtttttgtggggttatctgaaaacggtttgaaaccattaaagaactggccatttaactaataggtattcaagtcatgggacctccgttacccagcctcggaagagaaacctttacttacagccccgatgtctggctggctcctcattcattcatcagatttttgttgaatgcctatgaggtgttgaagcacctagttctgagtcctggagccagagaagagcaagacagacaaggttcctctatttatggaatgtatattccagtgaggaagaataaataggttcagatggtgctaagagctatgaataaattaaatacagagtaatgtgatttttaaaaagtgacttagagcaagctagggggtgaggagtgggggtggtgtttgaccactgtccagcggccagacagccggagaggcttctctgaggaggtgagccaaagcctggatattgaggaggactccttctccaggccaaggggagcagcaagtgcaaggcccgagctgagtagatgaggctgggagccagaccagtctcaggctgaccagtgctctgtcttgagaggagctgctggtcagctttttgtcttgggattcagaacgaggagacatgaagactttttacttggcagtgggagctgaagctgaaaggtccaggggctgatgaggccacgtgtaagcgaaagtttgggataagcagaaaccgagtgcgctgagggagtgagattgtggctgtatccggcacctggctgagcaggagagtgaaccccgtgggtgtgtgtttgctggtgacgttcctggagctgtcttgaagtccgagctgccttgcagctcgtagtctgcctctgtttttggctttcccagatagtttcaattcttactctcmgtttgtgaacctcccttcagtgaacctcccttcacttatgctggattctcttgcaactggatgagcttcactaaagcagagtcatttggacctggattcgaatccctggttttcsactttttagctgtgactttgagcaattatttaatttctgtaagcatcagtatccagtagctgtatccttatagtgttgtacagattaaatgagataataaaagcaaaagaccactgtagagtgtttaacacataggaggtactcaaaaatttgttaggtacctttcttcccctttccttcatgtgttaaagctttttcagtacatacccctctctcaggattgaattgtaaatcatgttttttgattacccttcttgtaataattcctctacctctgtagtcatgtttttcttttttcattttttcttgtccccagaatgtctaacaaaacagccaaatayacctctgtgaagacagagggtaaaataatgctagttctgtgagttctctcttcttgtgcaaatccataaactgccaccaatctgtagtcattttaattgcccctaaaccgaagagcatcgtggcaactacctttcccctcgtaaatagagtgacactatcactagtcttattgaggccaaagttataaagatgggctctcgatctactaatattagtaaaatgggtttgggacttactaacatttgtgcttagaagagacagacctggcaaagagcttggagaagtgagttccaaagagagaggtgtgggaaccaggatggaagagtcaggcctccagatagcgtttacttctcccttcttccttgaatcactgtctcagagataattaggttcagaagaggagaaaaaaaaagatgacgtcaacgtggagcagagtttttcttagaccttagcctagcaaggaaagagaaatccctggtctcagtactgggaagctgttccagccagagccccgtggctgtgaagagagctctcctgtctggaaccaaacagaaagctcataggtctagaggccagaaaagttagtaggtggcggctctggtcggtgctggaaatggaggccaggatgaactaagaagcaaactaaagatacttgtaagataaggacgtgtaggccgggtgcggtggctcacgcctgtaatcccagcacttcgggaggccaaggcgggcggatcacgaggtcaggagatcgagaccatcctggctaacacggtgaaaccccgtctctaccaaaaaaaaaaattagctgggcgtggtggcgggcgcctgtagtcccagctactcgggaggctgaggcaggagaatggtgtgaacccgggaggcggagcgtgcagtgagccgagattgcrccactgcactccagcctgggcgacagagtgagactctgtctcgaaaaaaaaaaaaaaraagatarggacgtgtatgttaacttgcgctatccaaacaacaagctgtgcttatggtcctctgcctgtgcgtcatgattttccaggacttcacaacgggataaagtgaagtagcttcggcttgtgaatgtgcattgcagagacgtgggagaagaaagctgcaaaagtcattataagcaacacccttgatcttaggggtgctggtctgtgagaagagagctctaagccttttgtagmggyattagaaaggtatcggagccacggtgaaatgcaggggagattgggtttaggggctttcctggtctgcattctgctacagccgttaaatgccgctagatggagtgcgtgattctggtatggcctcacgtggacctgctgcgaaggatggagagaacatggtctctgcttcccagaaaaaaggagaaatttggtaataagtgtggagactgctcttaaataatgctccagatttcaagccacttcttcctggaccatgagagagctccctaatgttgtatttatttttcctaggtccatggctaatgaaacacagaaggttggtgccatccattttccttttcccttcacaccctattccatccaggaagacttcatggcagagctgtaccgggttttggaggctggcaagattgggatatttgagagtccaactggcactgtgagtatgaacagtgagagatactgaaaaggacaacttaacagcagccgtactagcttttcctgtttgcctatccagagattttcatagtttgaagttgggcagagtagtctctgtttatctgagtaatagycacttcctctattaaagtcttttttttttttttttgagacggagtctcgctgtgtcgcccaggccagagtgcagtgggacgatctcggctcactgcaagctccgcctcccgggttcacgccattctcctgcctcagcctcttgagttgctgggactacaggtgcccgccgccacgcccggctaattttttgtagttttaatagagacagggtttcaccgtgttagccaggatgatctcagtcttctgacctcgtgatccgcccgcttcggcctcccaaagtgctaggattacaggcatgagtcaccgtgcccggcctaaagtcttaaacatagctctgtggtctgagaaaaattaggctgaagtcattggtgcctacctattacggtagatgagacggctttcttaccaactcttttccctccsgttccccatccttcaaatataattctaagttttagtctctgctgagtgaaccagtgygttatgattatgttttgaacataattttgtcttgaacaatatgtcttaatattctgttttttctagttaataattgcccttttaaagttagtttagtttttaatatacctatgccagttcctcccacatcatccagtgrcctctcratatgattttccatacagataactcctgtcttagtcggccaggactgccatagtaaaataccatagactgggtgacttaacaggaatttattttctcaccattctggaggctggaaagttgaagatccagattctggcagggttctggttctggggagggggtctcttcctggcttgcagatggctgcgttcttactgtggagcaagaaaagaggaggaggagaaaaacaaatctttggtgtctctttctcttttatgaggacaagggctgctcccttatggctgctccgttatgacctcctttacccttgaaggccagatctgtagtasagtcacatggcagggttaggatttcaacatatgtttgtttgttaagatgggcagtctcactatgtggcccaggctggtctcaaactcaagcgatcctcccctctcagcctcccaagtacctggtggctggcaagatccaagattactggtgcacaccaccatacacagcttcttttgttttgtttttgttctttaaaaacttttttttaacatgcattttggtggggatacaattcagtccacagcagtgaccaattccatttttaccttggagccctcctggaatcctccatcctttccgtgtcatttgaattagttgctcctcagactgacttgacagatttcagcatgagtgttagtggggacagacggccgcacccacaccacgtcagggtatatgtccgtttggaggctttcctcaaacgtctggcagccctggactgcctgtgtatgctgaagaagagggcacagaaaggctgagtctgcagggcaggctggctgtggctgccaggctgggctcctttgttgggggcctccagttgccagcacatctgtgggattttccctagagtcttcggtctctccagagcaggtgcctctgagctctggcccagcaggtacagacgctgaagcccaatagccggtcttccgggaggtggtctggggaaggggatccaggtggagagtccccctcagtgcctgctttcagcctgaccctcctccccctccctcttgcctcctcaatctgccggttgcctccagggctctcctagctcagcttccacttagagcccacttcctgtcttctgcaaggagcaggagcagggattgcaacctgagaatctaattgttcttaaaaagaatttcaacccgtccctttgttttcagtggcctgctgtgttcctaccacttcctgagtctttctgagaatgagtgggggagatctctggggacacttgagcttgagtgtctctgccgaatcacttccatgtctctgccttctttccctctctcctaaaacatattactccttccactttctttttgtgggtgtaagcctccatattactttggttaattttagtgtgctttggaacacagatgagtgcatgttcattctgccttgtttaattttagagacagggtgttgctctgttgcccagggccgagtgcagtgttaagatcatggtttactgcagcctcaaccttctggcaacaagtgatcttcccacgtcagcctcctgagcagctgggactacaggtgtgcaccatcacacctagctaattttttaatttgtagaaatgagatctcactatgctgctcaggccggtggtcttaaacccctaggctcaagcaatcctccctccttggcctcccatagtgctgagattacagkcrtgagccactgtacctgacccctttcaccttgtttagcctgacaacccatcttctccctctcaggtctttccatctcagtcttctgcactccaggcttctgcgtcttcttcctctgctcagcctttaattgtcgatgtttctggttctatagcttcatcttcttgtgtgcagtctctgtgaatgtaccctgtggctttattacctttgayattcttctgtcttctaaatcatctcctgaatagagtgttttctcctgtcctgggtgtcccgcagcccatagaagcagccatgctgtgggacaccctgagtggggtttgtgttacctgttgtgcctaccatgcccttccccgccgtggatgcacaggtgccccaccttagctgccccagatgctgtttatccttgatagtcaccttttaagccttatacaggtctatcaagttgagtcaccattaccacttggtgtgtgctgtgccttgtgtaatactgcagttccgggagtcctccaacctggaatgcatgctttgcggggatctatgatgccctcgaattgtatgttacatgtgaacytgtgagcattttctaggggctctgcacctttgtgtcctcagctctgagccccatgcttgctgcaaccagcaggtgttcagagtgaatgaatttgcttatcttggcataaatcatgtaactgttgatgataccccaggaaggtgagcctttggttataaatccttttaacattttccagtctaaaagttttgtggtcttattacasgatgtagaaaacagtgggcctcagttattcttttgctgttgtgccggartataccacggttgtttttgaaagataactttgaccatacccttaggaacttcctcagctcactttcaaatggagggcactggctttctaaccattgtgtctcccagcccagtgacagctgaagctgactgcttccgatatcacaggcagcacagaagagccgccctccaggtgctgctgggaaatgctgcctggaactctttgccatttactttctatcaaaagctgagggaaatggtacatatggggctttcctaaaaatatgggatccatccatttgtcarcaatgtcattctatcctatcccagggcctttcaagattttgrtgaaaactaatagatcccatattccagaataatgctattaataattttattattattacttaatgatagcaaaaagttagctaactccaaccgctcacttgttatttgccaggtaatcctctaatccagaggatttggccttttgtgtgtgttaatgtcctgcttgcaccagctctatgaggaaggtgcygctgttgtcatttccatttctgcactcgtggaaacaagcgtagtgaggccagcctgagccacagagctgcaggtaggggaggcagctggaaccctggcgcctggctgtggagtttgaggctctgactcctgcgccgcgctgctgccccaaccctagtcatacgaggtgtttcaccccgccctggatactctgagatcccctctgggttcagcaggctcagagagctgactgcctggagcagaaggcatggggtcctccagagactcccctgagctgagttcccctgtggacaccagggccgcctccttgtggcgctccctgaagggtcctctctggaagaactgtattggttccctggggctgctagaggaaagcttcacaaactggggcttaaacaacagaaactgacatcccacagcgctggaggctggagtccgagatcaaggtgtcagcatgcttggtcccttctgagggtcgtgagggaaagatctcttcaggcccctttccttggcttataggtggcgtgttctccttgggtatcatcacatcgcctgccttctgtgcatgtctgcatccacgtgtcccctttccaataaggatattagccctttaggctgggtcccgtcctagtagtctcatcttaactaattacatttgcgacagtcctatttccagatcaggccacattctgagatgctgggggttaggatttcaacacaggaatttggaggaatacaactcaatcaggcttatggaaaattctggtcttaagtcaagggtagtgttctccagtctgtatatggaggcgcacacctatggtcccagccacttgggaggctgaggccagagaactgtgtgagcccaggagttccataccagcctgggcaacatagcaagacctcctctcaaaaacagacagagtggtgtcttccagagtgattagtttgcttaaaaaaaaaaaaacaaaacaaaacacaaaccgtaagcactggcrctcrtgactgatcatcctgtatccacgcacgagctgcacgaaggccgcgcggtcactctggctccctgttggcgagtacctgggatttcttgctcagcattttggggccttaattcttttaggggactttttgtctaatgtctccccttcttctaattatgtgcgatatttacatagaatctgataaactgcttcaaatttgttttcagaacagtgagctggataattaaagaagctttttcctgcttcttgggcccagtttccatttcttccttttttctgtttttcctggctattctagtgctartttccttcctttcctttcctaggctggtcttagagcatcctctcctatgtacagccagaccttctttcaagcttttattaaaatggggaaaggtcatttgggaggctttgttgttttcctgtttctaaagatcatttttcttcctgcaggggaagtccttaagtcttatttgtggggccctctcttggctccgtgactttgaacagaagaagcgtgaagaagaggcacgaytccttgaaactggaactggccccttacatgatgagaaagatgaatccctgtgtctgtcttcttcctgcgaaggggctgcaggcaccccgaggcctgctggagaaccggcctgggttactcagtttgtgcagaagaaagaagagagggacctggtggaccgactaaaggtgagacctggggtatccggaagtgggagtrctggaggaaacagggcttcagcgattgttctggggcgattccgagactcaggcagtgcatgctcccctgccgttgccgtgcctctcagctcttccctcagctccttgggtctatggtgctgccgctgtgctgtcttttttgagctggaggtcagcaggccttctccacataaggaactgttggtgcccatttattactcacctgggaaaggacctgatcattgccattggcagcatggttcaatggctgcaaatggatctgatggagagcgtgtggctttgggaggagtgtgccgccttccgcagtgagcagcgaggctgggaccggcagggatgaggtcccgggwggggatgcggcagcccttgagtgctggccggggaaggagagatgcccccagtgaggaggcgccgggctgagtggcccagactccttaggagaggcctggttttgggcttccttggtgattttccttcatgtctgcctcctgtaggcggagcaggccaggaggaagcagcgagaagaacgcctgcagcagctgcagcacagggtgcagctcaagtatgcagccaagcgcctggtgagcctcatttcttggggggcaggattatgtccaggcagggttgctctgcttggaggctcatgggtgcgtggtcagggccttggtctcccctccrtgaccctcactggctatgtgctcccgtacagaagctgggctgtgagtggttgaggcgtggatcctaggagtcgacctctctccagccaggcagccaggcctatgtgaatggggcgtggtgtgctttgtctctggcatgtggggaggtgggtactggtgctgagacttcttcctccctcmccacctccactrcccctgtccagaggcaggaagaagaagaaagagagaatctcctccgcctcagcagggagatgctagagacaggcccggaggcygagcggctggagcagctggagtctggggaggaggagctggtcctcgccgaatacgagagtgatgaggagaaaaaggtggcgagcaggtgagacagaggcgatagcactaccctgccccaggccrggggacacccttgaagacagctctttccctcatgccacagatgccatgaagcacctggcaagaggcatggtggcctctgccctctgctctaagccgggtccttcctagggtccatgagtgccagtggcagtgaggacagtcaccggcctggcctgtgtcctctcagctgtcctcacggcagctcaggcagggcaggaacatttgtgtctgcgccttatacacaaggaggctgcagccccacaaggagagactccttggctgaggccacaagcctcggcagtggagagctgggctagaactcagccggcctggctctagatctcaggctctgaggcagctgactgcactgggtaacctktgaggtgccaaccgtcaaggcgtccttagcctgagctttccttctcccataaagcctctgttggtccagactcaaggtttccacttgatgagccatgagctgctgggtgacttagccctgagcaggccacccaggccatttcgggcccacaggatccctggtgacagccccgttcccattcacactggaacctcaccaccatccctgagtgtctgctctgagtatggcactgtccagatgctgtggacatagaagggaagaagacatggaggggacagttaatagacatgaaaacaaatagcacctatgtgaagtcagcatgtttgcctacaaggaaaacaaaatggtgatgtggatggggtggggggctgcacctgatgatgagtcccgtgtgtcctgtgacatcctggccaccacatctgtgggagggtaactgcaagaccagagaccctccgtggatattcctgaaggttcatccccggccttcacrgtctgtctgcagggcgccttctgacgccacctccagccgccatccaccagacgccagcttccccgctgccctgaacttcctccagcgcaccaggccttcctctgtcctgtctgaggatttgctcatgcaacgtgctgtggccaaacaccctgccctcctcccttggcagatgtcttcctctcctttaaggcctggctcaggtgtcgtcttggtggcttcgggtgtcagctgctctgttttgctcaygcacctgcttgtgcttctgttgttgcctcctctccctggctgggctcgagctgcttcagggcaggaaccacgtctttayagtttgatgttcccagagctgacccagtgtttggcataggggtgtgctcaatamaatcgagttgacatgaatgagcagatgctgcctcgttgcagtctggtagtrtaattccaggctgcscatgtgracttcgacttctgsccctgcccrgggcagagaccaccgtgttgctttatgcctcgctggtgagagggggtcataaacagtttgtgctccatgaaccsttcctgcccrcctccgaggtcrtgtttctgctccctctcttctcccttagagcccgtggggacaaggcagagaacttgagtggagatggaggtggtgaatattaraggaacaaagtgctccttcaggtctgggcaagagccrtggatcctgtaggtcagcttcyggggcttcccatgccctcacgtttcaggagataaygtgagcctcagaggacctgagttctgaatagaaaatttttgctcttcatttcttcacacacccagcctctcagtgagctcctgctggctttgtccagcatgcgacataagattgaatccaagccttttaagatagagccgcctgctctttagtgaccatgaagccaagcctgtaataattactcttctgatagcccaagacaattgtattctgctttgttagaaaggaatttcgaggtgaacaaaaatgttttctttttatgtgatgttgccataggtrgcgtgtgcctgtcagatggttttgtgttttctgaggagcatagactagtagagctagctcagcttcaggccatgggatgcagggctggcttccctgccaacgcctggcgctgatggattcttcccgcattgctgggaagggcagactgaggcrctgacaaaagaagagttgyagctggtcataagtgacagcatcctctgttcactcgattggtcagttgtagcttcatccaggagatggtcatggggttcctgctgcataccaagctctaggtgaggccacggggactcagcagaaacaaggccgacctgggtcctcccttgtggacatgacagtctggggagatagaccgagaggaagtgattttgaatgagatgggtgtgaagagcaggggccatgaatctgtgtcagagcagccaggcctaccagggaaggtcaaagaaggcttcctggaggaggtgatgtttctgctgctatctcagagttgactgggagctggtgaggggagacaacattccaggcacagaatatccgaaggcccgagatgatgaagagcaaatatccgccctggggcctcagaggggtccagcttgctggagggagggcagagaggagagcagcctgccatgagtcccgargcttccgactgaagacttgggttkggggtgctgagcccctttctcctttttacatttccctacccacagacctgagcggccatgggaggttggggttggcatttgcctgggggagtttctgagcgagcagcacctgctaccttggtggaacccattgctgggaatggccagggctcagcaccagcgctcagcagatgctcagtgcgttttgctgagtttgctgagggaagactgttttctgttctctctcwcacacacagagtggatgaggatgaggatgacctggaggaagaacacataactaaggtaacacragtgtcctcagctggtgctgtgctgggggtatagrctgggctgtgcacccctggggaggaggctggagtcacttggctacttctcaccctcctctccacaaaggaggagcttccagcacttggactccgttgcttcttgcacacaaccctggtcctaagttgctcccttggccagctgcagtggaccctggagtcctctcctggggtcagggcctggggagtcctctcctggggagacctttcctgggagcagggacctgaggagacctctcttgagtttggggcctggggagacatctcctgggttcggggcctggggagacctctcctgggggcagggccatgcttgccaccccagggcatcgaggaacagctgttctgggcggaaatctgggtgttttctgtccctgctgggtggtgcgggtaggacagacatgagtcccctgccctttgggtctctcatggtgtgcttctccctttgtctgtgttcccatttgcatggagggctatgggttgtgtatggtctgacatttcccatttggtttcattgatttatgacttgttttctgtcggaagtaggtattttctttgtattttctttttttcctcccttcactcttgccttagaggagtagagagagggtattctggtcagccttcctttttccctttggggatgtgtgtgacacactccctcccctcccaccaacaasccaccctccccaagtggggaccctttgccacgggagatggtcacccatgtccaaagattggccaaccccscaaaagcggttgattagaggctggatatgactcgtggaaggagctgcctttggggcattcccttgaacttctggagctgtgggtgacttgggaatccctgggtccctcgatagatgcctgacatgggacattgctgtcctgcctcggctttgtgcattgggagccactccctttccctcagcctctcaggccctggcgtgccttgatgttagagaatgctgtgggatgttttggttctctctttgaagcgcctttctttctctctgctagatttattactgtagtcggacacactcccagctggcccagtttgtgcatgaggtgaagaagagcccctttggcaaggatgttcggctggtctcyctyggctcccrgcaggtaaacagtagccagtatttccaccaggggycatcctgctcctttcsccacaactttgtcctgctcgtccaggccttgggagacgctgggtctgtgacaggctgaaccrtgtgaggagcagccccctccctgrcctggccggcccakcactggaaggcaaaggagaggtggcggggcaggtccacrtgtgttggtaggatgtcatttagctggcaccatctttytgccyctttctttctcctttgctgcagaacctttgtgtaaatgaagacrtgaraagcctaggttctgtgcagcttatcaacgaccgctgygtggacatgcagagaagcaggcacggtagccactrggaccrtggtgtagccgcaggtggtctggagagagtgaggcaggggtggcagtgactgaagaccattaagtgtctttcatagaaagaatggcagaggagaccccagttccttcctgagtcccctctccttgggaaaaagtgttcctaytctctgggtsagygtctggtccgaatcsttggcttggagatgattttacgggctctttctggagaacaraagtaaaacsttacagtgttccgatgagaccacagtaggcagtacttgggagggtcttatagacccyacccyryggaagtgggtctcaacattacacaaccccctctygggcccgtggacagttgctgtcctctctgttttctctctttgtgcctgtgccmccctcagagaagaagaaaggagctgaggaggagaagccaaagaggaggaggcaggagaagcaggcagcctgccccttctacaaccacgagcagatgggccttctccgggatgaggccctggcagaggtgaaggacatggagcagctgctggcccttgggaaggaggcccgggcctgtccctattacgggagccgccttgccatccctgcagcccaggtgagggccctgcagggccagaaagccgctcttgactctcactgtggtctaggccatgaggggsgtcctcatcacactgtagtttgggggatgccccccaccgtggtcaggttgatggcaccttaacccattctctcctgatgcgtgagttggaggaggcgcgtgggatcccttggggtctccaggcagcagggccagttggcattactggggatggtatttaggagccaggaaagccggtgcattcctagtgaaaccacagggagaggggggatgccaggagctgagaagagtgtgctgcatacatctatttacaaatggctttccaagtgatgctcccaacttccatgcctatgatgtgatggaggatgtcagtgatagaaccattcagttttccagtttttcctttttgtaatatcagtactcttaactggaaagctttccctaacttacacctacctgcagcacgtgagaatactgtcttctctgccacaacttctcttgatttttaaacagaaggaagaactgctaatgtagcagatsaaaagtagtatctcactgttatttggtgggtgcagtttcactatttccttgctacttctttaayttgagtgactttggaaacgggatatcactagtggaaaattctgtataatccagaaaaaaatgtaaggttttaaaagattcagggaactaagtaaccrtttgcacagcagctaaatgctcaccagcatacctgctgagctgtgtgggcactggcagagaaactgaggaaagctgccaggccccatggtktcccaggccttccctcccgtctgtttgcctttagagcaagattagtgctataggcatttatacacaaataccataatatggcccaaaatctttacaatttttgaatttttaaagtactttgaccatattttgcttttatgttaatagtattccagtgaaattctgtgcatggggacrctggagcccagaaaagttaagtgactcatattttctcaccaagcgtgggtgatggagccattcagttttccgayattttatttyttatatgagtattcctttaactggaaactttcctaacaacaaacacctaaagaystgcagagttgcttttatttttgttaccccagctccacgccttaaccctcactttgaaataggatgtrtcaaccctattttgcagatgaggaaagcaagrgtcagagaggttagacaactcttccagagtcacacagctgggaagtagcagctccaggagyagaagctggggccgcttcctggtgcaccgatggtctgcaggtgtttgtggaaactcgggggcctccggggcgaccttgaggacatggacaaggctaagcaggggttcccttcacccagccctgcccttggtttactcaggagtcagaccagccctagtttcctgtgtttcatgtattggcttttcatgtgaaactcgaggagagcttgtccgttgccacaagctgtttttcgaatgtctctacacagtccaggcaggaaatagaagcactcacatcaggagctcagtgtcagacaggcaaggctcctgcaggggagccccgccctgctcaggtggcctcatctcccctcccagctggtggtgctgccctatcagatgctgctgcatgcggccactcggcaggccgcgggcatccggctgcaggaccaggtggtgatcatcgacgaggcgcacaacctgatcgacaccatcacgggcatgcacagcgtggaggtcagcggctcccaggtgygtgggcctcccctccccrggccagggcctgcygtgasgtaaagggacttggatggttcctccagacaccygggccaagarttcctccggaggtggggcttgmtasagggtgcacragtcaaggyggtgacctcatcggaggctgaccatggctttccagtgcatcgggggacccygctatgacagagtgcctcatttycctgcacctcayctgcccccatgctcctgagtccctccagccctggatgccagcagccagttctgyaagccagggagatggcatgtgtgaggcagaagtcccctcaggattggattttgtcattactgaagttgtctggaggggactgaattgaggaatgctcaagatcagygcaggctcctcctgctgccctatcatgcgccatgcatggcaccaggtgtctctggtcttcacgctgactctgccatgggtgtggtgttcctgttttacattggaaacttggagattcaragatggtcaagctctgtcctgaggtcatgcagctcatgagtgtggagctggggtgtgcccactggtttctgactgtgaaaacccccacgacatcccaccrgctctactgacctgtgcctgggctgaattgaggctgggatgtgatggtgrccttgaaccatcactctttgtagactccaggtcttttcccaacccggtggaaactagcaggsagattccatacttgaggaattcagcctyttgctttttctctgacccacagtggacactggaggaaamcttcccttccttcccttttctcttagctcccaccagcctaagggctgtggaaacccgtaccttttgtctgcagccagccccctctcctccctttggtggcttcctgtgtgtccagggccagcatcttctaggtgaatctaagatgtcagtaccttarccytcrgctgcttgctcagagcctggtttgtgttctttccccagctctgccaggcccattcccagctgctgcagtacgtggagcgatacgggtgagatgtgacyctctgaggtagtgggacagtcccttggtggccccctgcrtgggcctctgagaggcaggcagcactttggttcccacctctggcccgggctgtggcggggtggagctgcatgccattcatgtcctaggcacatsatggtgtgtgctgcacacagacctggaaggctggggactgaccgctggctctgaggcctggggccgtggccagcctgctctctgggaaaggatttgtagcttgtgacccagtttgagaggcaccgggcagcaaggcttccactggggtgggcggggcgagtcgccatcagggcaccaccacttaatgtccgttggcttcttctcaggaagcgtttgaaggccaagaacctgatgtacctgaagcagatcctgtatttgctggagaaattcgtggctgtgctagggggtgagagcctcgtccccctgctgaccccgggcctgcaaaactcgctgggctgctttttccttggatgcccatcaggacacctcagttctctgtgtttttaagaagggtcggccgggtgcggtggctcacgcctgtaatcccagcacttgggaggccgaggcaggtggttcacctgaggttaggagttttgagaccagcctggccaacatggtgaaatcccatctctactaaaaatacaaaaaaattagctgggagtgttgccgtggcctgtagtcccagctgctccagaggctgagacaagagaattgc

SEQ ID NO: 94406 - DNA, 42495 bp, Homo sapiens
  misc_feature (1)...(42495): n = A,T,C or G
tatcttctttatctccctcactagaataaaaataccataagagcagagtttttttgttgttgttaaaaattttgttttcactgctatatcaccactgttgagaatagtagtccacaatggtcacaaaatgaatgtttattagatacatttattaatatgaagatactcatgaatgaaacattccaagtgagaaatttgaaacaatgttaaacattcaacaatagattattttttattattaacattattattattttttttgagatggagtctcatcctgtcgcccaggctggggtgcaatgacacgatctcggctcactgcaacctccgcctcccgggttcaaacgattctcctgcctcagcctcccaagtagctgggattacaggcgtgtgccaccacaccctgctaatttttgtatttttagtagagatgggttttcaccatcttggccaggctggtctcaaactcctaacctcatgatccacctaccctggcctcccaaagtgctgggattacaggtgtgagccattgtgcctggccaacattattattttttagatccagggtctccctctgttgcccagggtggagtgcagtggcacagtcatggcttactgcagcctcaacttcctcggctcaagtgatcctcctgcctcaacctcctgagtagctgggaccagaagcacgcgacaccatgcccagctaatttttttttgtagcagtggggttgcccaggctggtctcaaacttgtgagcctgtaactgctatataactattaactactatataaagcacaatatctaaaagaaatatcatgcagtcattaaaaactatctgtttctgtggaggagaccaaggtacacattgtgtttggccaatatatttcaacatttgtctccagagtgtttagacagaaagaagcaagttgccttcataaagctaaagtcacatttcttcccttacagaatttcaaaacagcctttatgaaaagtgagttatagaatttttttttagtaacagacaattgtttttagtgaagtacagcttttatgcaatattctagaaaagtgatcactttcaaattaacctagcataaaacctttacctggtgtacattcgacatacatgaaacttgggaatgcagacttccacgtttctccctgagttactgatctagtgaacaccagtgtcactgtgatccaaggcagaaaatcaaacattgcaagcaccctgggatccttacacatgtcccttctcaaccataacctgctctcctcccctagaggtacctactagtctgagttctatggtaacgattttctttatttgtttagttttatcttcaagtaaaaacaataggctgtaattttgcctgttactaaactctatgtacatagaattatatactgtggtttcttttgctcagcactttgtttatacaactgtggtattgtgatataataaatatgtactttggtctttatctccagctcctggccagagagcctataattcttttaattcctaagtgataaaggtgaagggtgaaaggaatgtctttttttttttttttttgagatggagtctccgtctgttctcaggctggagtgcagtggcgcaatcttggctcactgcaacttccacctcccaggttcacacaattctcctgtctcagcctcccgagtagctggaattacaggcatgcaccaccacactcagctaatttttgtatttttagtagagacggggtttcaccatgttggccaggctggtcttgaactcctgaccacagatgatccacccgactcggcctaccaaagtgttaggattacaggtgtgagccaccatgtctgtccatgtcttttgttattcatgacaaaccctttcaaccaaacctgagtttatgctaatgagctgactcttggagggcgggggctggttgccatgtgctatggtttaaatatctgaccctccaaatcttatggaggtggggcctatgggaggtgtttgggtgatgggggtggatttttcttaggaatggcttggtgccatcctctctgtaatgagtgacttctcattctattgatttccacaagagctgattgttaggaagggatgggcccctcctggcctcctgcttcctctctcgccctgtgatctctgcgcaatggctccccttcagcttctgccattactggaagcagcctgaggccctcaccagaagcaggtgctggtacaatgcttcttgcacagcctgcagaaccatgacccaagtcaacctcttttccttataaattagccagcttcagcttttcctttatcacagcattaaatggactaagacaccagggaagccaagcatgtgattagaggattggaactttcagccatccccacctctgggaatgggagaagggctagaggttgagtcaatcaccagtgaccaatgatttaatcaactgggcctatgtaatgaagcatctataaaagccctaactgaagaggctcagagagcttcagggttgctgagaaaggatatatccacatgcaagagggtagcagaccccaaactccatgggaacagcagctcccatgctcagaacccttccagacctcaccctatgtacctcctcactgggatcatttgtaatatcctttataataaaccagtaaacataagtaatgtggttccctgcattctatgagccattatagcaaattgtcaaatgtggggttgcaggaacccctgatttatagccagtttgttagaagttcaggtgataacctgggacttgtgactggcatctgaagtgggagagcagtcttgtgggacagagcccttaacctgtggggtctccactagctcagggtagttagtgtcataaccgaattgtagtttacccatctggtgtcagtagggttggatgattgcttaatgtgaaggaaaacctcacatatttggtgtcagaagtgttgtgagtagaggaaacaagtgtttttcttttttttgagatagagtctcgctctgtcgcccaggttggagtgcagtggcatgatctcggctcactgcaacctcctccatctcctgggttcaagcagttctcctacctcagcctcccaagaagctgggattacaggtgcctgccaccatgcccagctaatttttgcatttttagtagacacggggtgtcaccatgttggccaggctggtctcaaactcctgacctcaggtgatccgcctgccttggcctcccagagtgctgggattacaggtgtgagccaccgcacctggccgtctttttctttttttatatttttttgagacaggctctcactctgttgcccaggctggagtgcagtggtgtgatcatggctcattgtagccttgacttcctgagctcaagtgatcctcccacctcagcttcctgagtacctgggattacaggcacatgtcaccacgtccaactaatttttgtatttttttagagttggggtctggctatgttgcccaggctagtctcaaactcctggcctcatgtgatcctcctgctttgtcctcctaaagtgctgtaattacagatgtgagccactgtgcccagccatgattttcttttaaccacacttattagtgtatgacctttagttcatatgtttcatttttgcatagtattccattatatgactataccacattgtactcttgatgagcatgttggttgtttctggtctgtggctattacaatgtgtttccagtactgttgttctgtgttctgatgcatgtgagtgcatcatttaaaaaaaaaaaatatatatatatatatatatatacatctggccaggcacggtcgctcacgtctgtaatcccagcactttgggaggccgaggcagctggatcatgaggtcaggagttcgagaccagtctggccaacatagtgaaaccccatctctactaaaaatacaaaaaattaaccaggtgtggtggtgtgtgcctgtaatcccagctactcgggaggctgagggctgaggcagaagaatcgcgtgaacctgggaagcagaggttgcagtgagccgagaccatgccattgcactccagcccggggaacagtgtgagactctgtctcaaaaaaaaaaaaaaaaaaaatatatatatatatatatatatatgtatcttagcattactgggtgtcttagtcgttttgtgttaccataatagaatacctgaggctggtaatttataaagaaaagaggtttatttgactaatgattctggaggccaaaaggttcaagactgggtagctttatctagtgagggcctcaggctgcttcaactcatggggggaaagtggaaggggagtagtatgtgcaaggagatcacatagcaagaggggaagcaagagagagaaaccaaggaagacagctaatctattctgcaagagcaagaacccacttatccttgaggtagggcattcatctattcatgaggaatgacccaaacagctcccactaggccctgcctctcaaccctgaatgagttttggtagggacaaaacacatccaaactatagcactgggtgataacaatgtgtatctttagctttcctacataatgccaacctattttccaaagccacttggaattgttaagcttttccatttttgccaacgtagtggatgtgtatggtatataaagatatttctaatttgcattttcttgattactaatgagattgatcatctcttcatgcatttatttgccattttgggttttctgttttgtgcagaatcttaagcttttatgttttgcctttcacattgaagtctatgtagtataacgtagggatgcaatttcttttcctctgtgggtgcccaattgacccagcaccattgttcagaacaccgtccttttctcaatcttctgcaatgaagcctttgtctagtctcaagcatccacatatgcatggatctgtttgtgagttctctactgtgtcccattatttgatgtagctatttctgccctaatactataccctatttgaacaaaaagaggatgatttaatgctaatatatggagtggagaaattcaacaaggcctgtctgttcaggtttccttggcctcactgttcctccctgcaacacccagtggaagaggagccctctggaactagggtttagtttctttacagccagctgtcacatagaaaggcagggctggaggaaggttagagtagtattttcaggtgccacggctggctttgggggaaaagggttctggtttctatgacctgccagggggaagagagattctagttgctgtggcttgcttcagagaggatgagtggccacagagaggagggcaggagaaggtcagagagagactgtgattgtgaagctgatgcttagaccttcatttgggatattcttttctgagccccaacaacatacattcatatgacccattgttaatgaaaagagtcaaactctggaaaatatttgaagagatttattctgagccaaatatgagtgattaatggcctgtgacacagcccttaagagatcctgagaacatgtgcccagggtggttggggcacagtggggttttatacattttcgggaggcataagacatcaatcaaatacatgtaagatacacattggttcctttggaaggacaagacaactcaaagtgtagggagaggggtgcttccgggtcctaggccgatttaaatatgttctgattagcaattggttaagttgttatcaatagaatgtccaggttgtgataaggggttgtggagaccaaagttttattatgcagatgaagcctccaagtaacaggcttcagaaagaatagattgtaaatgtttctcatcagacttaaggtcggccttgatgttaatgacccaccctcacccccacctccttccatcatggcctgaacaagtttttcaggttaactttggaaagcccttggcagagaggaagggtctattcagatggtttggtgttgggttcagaattttattttttggtttacaccattatatccgatcatatataaatacaaacaaaaacttcaccaaatattactttctttttctaatggtgtgtgtgttttgggacaggatctctgtccctcagactggagtgcagtggtgatttctgctcactgcagcctcaaactcccagctcaagcgatcctcccacttcagccttccgagtagctggaaccacaggcacccacatgatgcccagctaatttttgtatttttggtagagatggggtcgcattagattgcccaggctggtctcgacctccctggctcacatgatcctcccgccgcggcctccgagcggctgggatcaggcgttaatcaccgcgcccgggctttatatttcgttttgaaaatgctgagatggacgcaaagggctgagtgctcagtgtcccccagtcaccctcagttgcagcttccgtccaaagaaggaatcgccctctccctgctggggccactaacagcactaacacggtccgaatggcatyggcaaagctcgggaacggcgacagatgggaagacgcgtgggagcctgggggatctcgggagagccgcgcaaactcgcggcggacgcagccagcacccgcagccagcacccgcacactcccacccataccccggcagcccgccaagactctctggcccgcacctctatggtaggaaacccagaaaacaggaagtggcctcgagagggggaagggaggggcggggcctccgccaccacctcagctgcggaccgaggcgagatggcggccaccgagggggtcggggaggctgcgcaagggggcgagcccgggcagccggcgcaacccccgccccagccgcacccaccgccgccccagcagcagcacaaggaagagatggcggccgaggctggggaagccgtggcgtcccccatggacgacgggtttgtgagcctggactcgccctcctatgtcctgtacaggtaacgcccccggcggccgcggctcgggacactccctggaggcccagcggccccaagacccgcggcgcgcttccggccccggcgcgccaggccgaagttcccgtggcgccgcgtgggccggtgcatggcgctgggcccgggcggctgccggatcgtcgccgcttcccagggcggcgccgggcgagaccgcggggacgcgaagcagcgaggtctcggctttccgcctgctttaagccacgcggaaactgctgcacccttgactgcactcgttcagctgttcaggcgtcgcgattcgtaaatataagaaatttcccgctctcttccacggcttcccagaacgctgtgtcgctaacaaccagtgaagacccaagggctagggtgcagttctggtagccgggcaggaaaccagggccagatttgctcaccctaaaaacgaagtgtgagggcttccagtggctggctctgcttggagcccagagacattttcatccaatctgtattttagcgcctcgtatcagccaggctaaaggctgaaaagagatttgctactgaacctctcttaagtctccctgcatcgcctcgtacataatacaagtgaggtgtactggggactgcggtaactttcttgcctctgtcaccccgtctttgctgacacccagttccatcagttctttgctttcagatggtaatgttgattcctaattccctgtgaacctgcagagataatcgccttaggtcttacttctgtagttctaggtaaatccattcgatggcttgtttaccttgattttgtgaatgagtagaagtcactacccatatatatttttttgattggagatagtgttttactgatttaaattggtagccccataatcctcaagtctgctctctggattgtgaaatactcaggttctcacgtgactgtgggtgatttcctggtgactaaatacagccttacctttcccaggccactcccccaggctctaggtgtcacgtcttaggtcatgatttcacttgtatttctccctgtataatggacacaattactagcattgcgcattggatgccacagaatctctgctgtcaacagctgatcattatagagaaataaaaagtgaaaggaagggccggcgcggtggctcacgcctgtaatcccagcactttgggaggccgaggcgggcggatcacctgaggtcaggagttccagactaacctggccaacatggtgaaaccctgtctctactaaaaatacaaaaattagccgggcgtggtggcgggcacctgtaattccagctactcgggaggctgaggcaggagaatcgctttaacccaggaggcagaggttgcaatgagcggagattgcgcccattgcaccacagcctggacaagagcgtgactccatctcaaaaaaaaaaaaaaaaagtgaaaggaaaagaatataagtgaaagtgtttaagagaaattttgttacactgggtaggtagttcacagaaatttctgtaagcactcactgttgtcactatacagttattttagcattgcttattaagtagtcattgaatgccgcctgtgtgctgtggatgttttaagtgcttatctcatttaatcctccaaatacccttctaaggttggtaggtaataatactgccctgattttataaatggtgaaactgaggccccaataagtaactttctgaaggtcacacagctattaagtgctccagccaatgttacgacttaggcagttgtcagattccagagcctgtcttattaatgatcacctgcgccacctcttgagtaaattaatagtacttatttttatcttaaaatgtcaattcctagtattttgttactcaaacgttttaaaaatgctgactgactcaaagaatcttactagaccaatgagttagattgatttctaagttaaaaatactgtgaggcagggagcggtggctcacacctgtaatgccagcactttgggaggccgaggcgggcggatcaccaggtcaagagattgagaccatcctggccaacatggtgaaaccccatctctactaaaaatacaaaaattagctgggcttggtggcgcccgcctgtagtccttagtcccagctactcgggaggctgaggcagaagaattggttgaacccaggaggcagaggttgcagtgagccgagatgacaccactgcactccagcctgggcgacagagtgagattccgtctcaaaaaaataaaataaaaaaaagtactgtctacttgctgcaaaaacttatttttctacttataaaactttaaatttgaaaactgttgattagcttttcagcatctgagggttatttgttttaattttactttaatagtttaatgtgtaaaacatattggcaaaacttggtcatgaagaatccaaccatgattacattatgagccctgtaagttattaatatcaatgtaactgtaattattgtcattttaaaaacactagagtcccttttcttctgtatttgaatgtaaccactggttggggaatgtctgttttcagggacagagcagaatgggctgatatagatccggtgccgcagaatgatggccccaatcccgtggtccagatcatttatagtgacaaatgtaagtttgtttatattaggaaaaggtctgtaagttaaatatagtagcagaattggaattcacaactatgtagcaagatagatgacaaatttctgtctaataaaaatctgaatgacttaagatgagttaattttgtgtttttttwatgtgtgtgtgtgatttagctttatgattaaaagttttattttgcccaaagactggacatattctaaataataaacgttacagtatagtagataatagctactatgtgattgtggttttcttttctttgctggagactccaccgccagggagattatgcatgtaccacacaatataaatgagttactgtttttagaataaactttggttgctgaaacatcaggatttaaacatatattttggcagtgaagtgttcagctcagttggaatacatttattgatattaaaatgagtggatttttttctttgacaaaatattcttttgtaatgaatgtgaaagtgtaaattgaaggtcgtggaaatgttaattgttagttcttctaggaaagggaaaatgaataaaatggaatgatagttttgtaattttatgtatatatatttctttcagttaaggcttttctaagatcattcttttacaaaagcatttttttctgctaataaaatgacaataaatgtttaaaaaagcataatgataggtttgccgtattaagtgtgcagatatattactaaacttaatgattaagtggaagtagcacagaagtagatttgtaaagactcgagaaatagatcctcactctatgaaagcttaatatgtgataaaaaggacattttatacctttatgaaaagggtggattaatcaaataatggttggaacagttggctgtgcacttagataaaagcagagttgtatccctatcattcttaggatggagaacgtattaggcaagatgtaaacctcagaatcgattaaggagaaggtcagaatatataactgcacggaaatgcaaaactctcatactttgagagatagtatatatgaagagacaattcacaaaatagaaatatctatgaagagatattaaccttactagtgatcagagaaatataaaccataacttattcagattcataagtacttataacagagatgttgggggaaactaatataatcatatgtttccattgaggataaattaacctttttgcaaggtataaaattaacattttgggccaggcgcggtggctcacgcctgtaatcccagtactttgggaggctgaggtgggcagatcacctaaggttaggagtttgagactagcctggccaacgtggcgaaaccctgtctctactaaaaatacaaaaattagctgggcgtggtggcaggcgcctgtaatcccagctactcaggaggctgaggcaggagaattgcttgaacctgagaggtggaggttgcagtgagccacgatcacgccattgcactgtagtctggacgacaagagcaaaactctgtctcaaaaaaaaaaaaaattaactttgtgaattcttacatacaccatggttagaaaccctaaaggraaagataagtttgacctgtcaaccgtttatagacaaatatatcaatttaaaacttacacagcagaagaaaccatgagcaagttaaaaagcaagcagcagtgtggaagaaggtatgtcatttaaacaggatccatattaaaactgagacgtttttacaacaggataaggagacagagagtttaatcaaaaaatggacaaagggtatgaactggcaattcacagaaaagaaaatcccattggccaataaaataggaagaatcctttatcattaagaatgacaggttaaaatgagaattccattttccacccatgatttaagtggcagaaatgaaaactgtcttgatattatattaggtattaagatatatgaagagctccatacatttcatatgggatttttcgaatgtttagccattttggaaagtagtttggtatmtctgttaaaactggaaaatgcacttatcttacaacctagcagtgtgttgcttctaatttaatattgggttcattctggcacatggcatgagaagatatgcacaggaggttaaaagcacagactttggagccagaccatctggttcaaattctaacttcacattttactgactgtgtaatcttggacaagttatttaactcctatgtgcctctgtttccacctgtgtaaaatgaggatcttggtagtaactatagatgtagtaaattatttacataaaatagtagaatactgtctggctcatagtaagcactatatatgttagctactataatttgcagcattttttgaaaaagcaagatattggaagctatatgtctatcttttggagaaatggataaaataaaatgtatcattgtcatacagttaatactatataaccgttaagaggatttagatctattataacatgaacagatctcagaaacaatgttgagttaaaaaagtcaaagtttgagaawcttcgagcatgacaatatgttgtttataattttttttttttgagatggagtttcgctcttgttgcccaggctggagtgcaatggcatgatcttggctcaccgcgacctccgcctcccgggttcaagtgattctcctgcctcagccgcccgagtagctgggattacaggcttgcgacaccacacctggctaattttgcatttttagtagagacggggtttctccatgttggttaggctggtctcgaactcccgacctcaggtgatccgcccacctcggcctcccagagtgctgggattacaagcgtgagctaccgcgcctggtctgtttataatgtttgaattaaaagaataatgtttcattttaccttttacagtgaatcggattttggttgtttacataggaacctgaggctttggagctatcccagcctgatagcctcccagtttattttatcaatgtgcatatgtgtatgttttatgtgtgtgtgtgtgtgtgtgtgtgtgtgtgtgtaagataatgtattatatatatacatttgtatacatatttaatatgttaccattttgttttaaatttgaaattatttggaagcttggttttttttttgagacagactttcgctcttgttgcacaggctggagtacaatggcgtgatctcggctcactgcaacctctgtctcccaggttcaagcgattctcgtgcctcagccttctgagtagctgggattacaggcatgtgtcaccatgcccagctaatttttgtatttttagtagagatggggtttcaccatgttrgtcaggctggtcttgagcttctgacctcaagtgatcctcccacctcggcctcccaaggtgctgagattacaggcctgagccactgctcaaattcaactttttaaagatagtgtttagaactaggtaaactttgtatacctcagaattttgtgaagaggagtaattgttcatattcgtgtctgatactttcagtgttacaggctaaaaggaaaaaactgtttctctatagtcaaaatacttcgacaccaaatgtttggatttttcacaccaagcaattttctgtagacaccaactagttgccctacaatttaattcagttctgacattacccagagttagcacagatcccacaggccaagggatcagtgctgcaacatccatcccacttcagatgccattgcaagtagtgggtcaccacattacccacatttaatattctacttggctgtaaatgacccctttctgtttttttcttttcagagacaggctctcactatgttacccagcgtggtctcaaactcttgggctcaagcagtccttctgcctcagcctcccgagtagctgggagtacaggtgcaaaccaccatacctggcagttccttttttttttttttttttgagacagtgttgtgctgtcacccaggctcggtgcttgcgatcatggctcactgcagccttgacctcccaggctcaagcgatcctcctacctctgcctcccgagtagctgtgactgcaggcctggatcaccacgcccgattaatttctatattttttgtagaggcggagtttccctaagttgcccaggctaattttaaactgctgggttcaagtgatctgcctgcctcagtcttttgtttgttttttttgtaatccaatgctcccaataaatatccttgaatacttgcacacatatgggagtatatttgtgagagaactttctagagctggaattactgggtcaaagagtatgtaaattttaatgatttgttgtagaagtatttgtactagtttacactatctttaataatgtacgagtgaaaaatgcaaagctcagagtgtgatgggatcctcgtttgcataaaaatgaaggatggaattaggctatatacttgtagatgcatagactatatttggaaggatacactagaatgagttaataatggttnnnnnnnnnnnnnnnnnnnnnnnnnnnnnnnnnnnnnnnnnnnnnnnnnnnnnnnnnnnnnnnnnnnnnnnnnnnnnnnnnnnnnnagttaataatggttgcttctggggaggaggcttgggaatttagtggaatggaaatctagtgtgaacctttttgtactgtttgagttttctgcctttgggcatatttttcggttaaaaatctgatcaaaatgtcagaaaaacagctatatgaatatatttgaatatatgcaaccctaatttttcttttatacataaggcctatgggagatatggaatctggcatgaactcatgcacacacgtaagcagtaagcatacagttatacataaatagtccatgctttttgtggctgaggcactagggcattattagggtggcggccacagccakttgactttattttgcttgttggtataaatgatacacaggccaataaaatatctttataggtatagtgacattatacattatagtgctaattttaagtaagatggtcctaatgtagttgtktgctctatctctagttagagatgtttatgattacttccgagctgtcctgcagcgtgatgaaagaagtgaacgagcttttaagctaacccgggatgctattgagttaaatgcagccaattatacagtgtggtaagtaatacacatcatcagtattccctgcttaaatgttttacttcaagtggcttttctttttttaaactgtactttaatttttttaaactgtactttattttttttggaggggggtgcagtttcactcttgttgcccaggctggagtataactggtacaatcttggctcactgcaacctctgcctcctgggttcaagtgattctcctgcctcagccttctgagtagctgggattacgggcgcccaccaccacgcccagctaatttttttgtatttttagtagagacagggtttcaccatgttggccaagctggtcttgaaatcctgacttaaggtgatccactccccgcggcctcctaaagtgtttggattgcaggtgtgagccactgtgcctggcctttaatttttatcaaaatagcaattcgcttatgggtttaaaagtcagaagctgcatgaaaagtagcaatctctagcccaatattccctcccactgccagtcccactccgcagaggtggtaagtaactcttagtgatttttttcttgaattaacctccatattctagataatttgcttaactgttattattttttcattttattttattttattttatatttttacttttattttttttttttgagatggagtcttgctttgtcaccatctggagtgcagtggcacgatcttggctcactgcaacctctgcctccagggttcaatcgattttcctgcctcagcctccccagtagctgggattacaggtgcccgccaccatgcctggctaattttttatttttagtagagatagggtttcaccatgttggtcaggctggcctcgatctcctgacctcgtgatccgcccacctcagccttccaaagtgctgggattacaggcgtgaaccaccgtgcctggcttatttttttcatttaaaacattattccttctgtgaaagatagttcattctccactaccctccctccatcacaaatgagcactcaatttatgttcatgctgacacacttttttttttttgtttgtttgttttgagatggagtttcgctcttgttgcccaggttggagtgcagtggtgcaatcttggcttactgcagcctctgcctaccagattcaagtgattctcctgcctcagcctcccaggtagctgggattacaggtgtacgccaccacacccagctaattttgtatttttagtagagacggggtttcatcatgttgctcaggttggtctcgacctcctgacctcgggtgatccaccagtctcagcctcccaaagtactgggattataggcgtgagccactgtgcacggctgctgacccacatttaatagtataatgacattccctctaacagtgtcatttttgttttctttgtaccaataggtaatttgtcgtccagatgctctgctatatgtgaagtatcatttttctattgaacacaggtcatccttcagtttcatttttctcttcaccaattggatgctgcatacctggttttcagctcattcatgtgttagatcccctgtgtcctagatcgtatacctttctctttcttgatttactttctcattttatagagcacatcattgagtagaaagatggaaaataatttttgggatttatacaattaaaaatcattagtctcccttcaactttagtaataaaattgtagattggaaattattttccctcagaattttaaaactctttttctgtttctcttagcttcttttcaggttgagaagatttccattcctttgtttaaaacttttctttttctctttatgttctggggatttttctgggttcttctgataatttcttctctttcctctgttttctttttctggaatgccttttagttctatgttgtatctcctcaatttttcttattttcatttgtttatctttttattttcttttgagataatttcatcaattttattttctaactctcgtatggatttttaaagatttctgcattcatttttaatttgggggagctgtttttttgttctgtgaatatgcttttttttttttgagacagagtctcgctcagttgcccaggctggagtgcagtggctcgatctctgctcactgcaagctctgcctcctgggttcacgccattctcctgcctcagcctcccgagtagctgggactacggacgcctgccaccactcccagctaatttttttgtatttttttagtagagatggggtttcaccgtgttagccaggatggtcttgatctcctgacctcgtgatccgcccgcctcggcctcccaaagtgctgggattacaggcgtgagccaccttgcctggcctgaatattcttttttaaatagcatcgttcgtgtgtgtgtgtgtgtgtgtgtgtgtgtgtgtttaatttcatggatgtgagatcttctcatctcttttgttctctttcatataaatatttttctcaaatggttggtaattcttgactttctctttatgcgtataagagagacaggaaaaatcctgattggaagccctgtgtgtggcaggatttgtcagctgaagggcttcgctgtgaagttactgagtggggatgtggctgtgttgtagtgaaatctcactagtcagtatttaagtcttttctcttggacagtgtgtctctcaaagaggattaagtagtttattgcctaaggagtgtacatttaactgccacagttctagggtgttaggcaggggaagatggtaggagagtctcactgtttaggataccaactttttgctttttgcagatcttatcctgttgtaatttgaaatagaaacttttttttctaagtttgtatatcaacattttaaatgtccttatttccaccctttaactcaccctgccttccagtgtgccttgtaacccattctgcttcagatttttccagagaataaagccacttgtctcctgcccaagacaggatgtcacttctgtcatggtagtgggaacggtcttggccgccaaggactctttatatagactttccactgtttttagtcccagttttggaaatacgtcatacctctgatttctggaattttcttaaagtcttattctgtgttttagttaaatcttgtctatctgctcacacttcccataatgttgttgacctcttccagttgccgtggtatctttgccccgattctctttgttcttgtgggtttattcctttgttgtcattttagtggggttttattagggagtgagaataaacttgtttacttaatctaccctgtttaactggaattctcagtgtgtttcatcatttttggaactgacagtacacttaaaagatttcctgtgagtttattgctgttttgaaagaagcagtatacctggaatccttacccataaaagccaagggcttatatttacatgctctgggaagtctactttttttttttttttggaataataatggagagaaatactgttgtctctcctatttagcattttattttattttatttttattaatttttttgagatggagtctcacgctgttgcccaggctggagtacggtgacgtgatcttggctcactgcaacctccgtcaccggggttcaagtgattctcgtgctgcagtgtcgcgaatagctggaattacaggtgtctgccaccacacccagctagttttgtatttttgtttgtttgtttgttttttgagacggagtcttgctctgtcgcccaggctggagtgcagtggcacaatcatggctcattacaacttccgactcccggcttcaagcaagtctcctgcctcagtctcccgagtagctgggactacaggcgcatgccaccatgcccagctaatttttttgtatttttagtagagatggtgtttcaccatgttagccaggtctcaaactcctgacctcgtgatccgcccacctcggccttcccaaagtgctgggattacaggctaatttttgtatttttaatagagatggggttttgccacgttggccaggctggtctcaaactcttgacctcaagtgatctgcctgcctcagcctcccaaagttagcagttcattttaaaagctaataaaattaggtcctggaatgtcccttactatatatcgagttggaaatttttgaaattttgaagtaaaactagaccagaactaacgacgtctttaggaaaattccttttgttggtggtggtggttaaaactccacctatggggaaattaaagacaaacttgtttcatttacaagtagcatttttgtggttgttctagaagtattttgttaatgtttataatagaattaatttattatatggataatgtatgtacacgaacaacgtgtactgtgtagggaaagagatgtctttgattttcatattatagaacataggtgaccagagtagtacctgaaaataattttagttggttggctgtcattacttaagaatcagaaatttacttttcttctatctcatacttgttacctttcactatttttttctttttgagacagagttttgctcttgttgcccagtctggagtgcaatggcgtgatcttggctcactgcagcctctgcctcctcggttcaagtgattctcctgcctcagtctcccaggtagctgggattacaggcatgcaccacctcgcccaactgattttgcatttttagtagagatggggtttctccatgttggttaggctggtctcaaactcctgacctcaggtgacccacctgcctcagcctctcaaagtgctggggttacaggcgtgagccactgtgcctggccacctttcactatttttactaaaagtgcttcatttcttccagtcaccagatagtccactcacaagcacttaaattgttaaattatacagagtacctatgtataattttttttttgggtgggggtggatggagtctccctctgttgcccaggctagtgtgcagtggtgtgatcttggctcattgcaacctctgcctcctgggttcaagcaattctcctgcctcagcctccccgagcagctgggactacaggtgtgcaccaccatgcccaactaattttttctgtatttttagtagagacgaggtttcaccacgttggcaaggctggtctcaaactcttgacctcatgtgacctgcacacctcggcctcccaaagtgctgggattacaagcatgagccaccgtgcttggcctataattgttaaattatacagattacctgccaaaaatttgtctaactgtattgctgacttgtagctgtatttgatattgttattagggaacttctgtgtaataatgcgactttggatgttgtatgtttgccctaggcatttccggagagttcttttgaagtcacttcagaaggatctacatgaggaaatgaactacatcactgcaataattgaggagcagcccaaaaactatcaagtttggtaagtttggagtctagctgtgtctcccaggctggagtgcagtggcatgacctcggctcactgcagcctctgcctcctgggttcaagtgattctccagcttcagcctcctgggtagctgggattacaggtgcacgcaaccacacctggctaattttgtatttttagtagagacggggttttgccatgttggccaggctggtctcgaacttctgacctcaggtgatccgccctcctcagcctcccaaagtgcagggattacaggtatgagccattgcgcctggcctagaattttatttaaaaactaccactgtagccaggtgcannnnnnnnnnnnnnnnnnnnnnnnnnnnnnnnnnnnnnnnnnnnnnnnnnnnnnnnnnnnnnnnnnnnnnnnnnnnnnnnnnnnnnnnnnnnnnnnnacttgagttcaggagtttgagaccagcctggccaacatggtgaatccccgtctgtactaaaaatacagaaattagccgggtgtggtggcgtgcctgtaatcccagctactcaaggagcgtgcctgtaatcccagctactcaaggagcgtgcctgtaatcccagctactcaggaggctgtcaggataatcacttgaacctgggaggtggaggtttcggtgagctgagattgcaccactgcactccagcctgggggaccgagtgagactctgtctcaaaaaaaataaaaaataaaaaataaattaaaaaactaaaaactttaccattgtagcctgttgattacaagattgttgtatttctaagaaattacattataaaataattggtttaatgggaaaagagattaaatggagagttgcagaccctcactaaagttatttaccctgtggaattaaggtgcttttatgtaaaaatctgtagctataaaattctgacatcacaggcattagtgtttgattacatcgagtttttgctaaagagaaattgcttttcttttctggatactgcacactgtcattagcacttcatcacccactgttatgtaaaacacaaaaccactcaaagtagctgctatggaaagcccagcagttttgaaattgttgtacatttctaattatccgctctgttcgttttataaccagtgtagtacaggcgatgcaaattctgtatcccagttaactaatcacttttattaacttctaactgaaaacttatgctataacataaagccgtgtaactccttaaatccgagaacatcagcatgaactttttcttcctcagtttgatatcctggaggatctgattcttagcttttctaaattactgaactcaccagcaacctggaaaaataaaatccagctagtgttcactgacttggaagatttctaaaataaatttggaaaccttctgtctaggcttttgtttttggtagtatcttgtcttaatctgtaagacgaattttttaattttccaggcatgtagaataggtcattcattaagcattaaatccttccctttttcctattgttctgctcacttttagttgaatgttatactctaatatagattttttaagggtccgttttattgagatatagttcacttaccatacaattcccccattcaaagtatataattcagtgttttttagtatatatacagatctgtacaaccatcaccatagtgagttttagaacattttcactaatagatttatataaatatttcagccaaagaaaattataaaaatggaacccaatataaaatccttaagtattttcctagcgcagaaactcctggccgggcgcggtggctcacgtctgtaatcccagcactttaggaggctgaggtgggcggatcacctgagggcaggagtttgagacctgcctggcaaacatggtgaaaccccgtctctacttaaaatccaaaaaattagccgggcgtggtggcaggcgcctgtaatcccagctactcgggaggctgaggcacgagaattgcttgaacctgggaggcggaggttgcagtgagctgagattgcgccattgcactccagcctgggggacaatgcactccagcctggggaacaagagcgagacttcgtctcaaaaaaaaaaaaaaacaaaaaaactcctctgttgacaacttgcaacttgtcatagctacttgccagtgtagcagtaaattcagttctgcccactcatttgtagaatgagaagctgcttgtttgatgacactttgcacttagggaaaattgacaggcgtgtgttaagtagaggaacttatatatttgataaaataatagcacattttgtcttgtctctcattatacaatctagtaatgtttcttaattttttgacacaatttcatggttgttgaaagatactaccagatgtagtttgagataaactatctgaattttttttctattttttttgtgttaccttttctccacagtggagtgttaagaattagagatgaatttttgtttattgtgtgtcctttcatgtcacctttacaacatgtgcaactgatattttagttcatgggtaaattaacaaaaaacttctctcccttctttgggctttaggcatcataggcgagtattagtggaatggctaagagatccatctcaggagcttgaatttattgctgatattcttaatcaggatgcaaagaattatcatgcctggcagcatcgacaatgggttattcaggtattgcctttcttgtacagtgtttttcagattttttttttaactgaactaaataaaattactcttaaagtctgtttctaaaccaaaacacacacatacgtagatcattgcacccaatatataactaaaaattattggccatgtgtggtggctcatgtctgtgatcccagtactttgggaggccaaggcaggaggattgagtgaggccaggagtttgagatcagcctgggcaacaaagtgagacccccgtctctacaaaaaatacaaaaattagccatgcatggtggcacacacctgtagtcccagctgcttgggaggctgaggcaggaggattgcttgagcccaagaatttgaggttgcagtgaactatgattacaccactgcagtctaccctgggcagcagagtgagaccctatctattttaaaaaaaaacaaacattattaacatacttaaaacctgacatccttcatgttagctaacctttataatctctttggatgtagtaaatttttagtattttttagattgaatttgtatcatatttgctagcaaattgagtataaagagtarcatatttttactacagatgtattattttaactaacaaaggcatattatacatttttttcatatataaactttggaataggattttacagtaacttaagttttttatttctacccatgtgtcaaagttttatgctaaattctgaatagaatagttgtaactcccactctgggtattttatttattttaaacagttctagtattgtttcctgtgaattttttccagggattgctactttctgcactattcattagaccaagagcatttcaccaaatacttaaaacttaaaaatttttaaacttttccaaatttgattaaaaggataacatattctaaaggtattcaatatttttacttatctctgaaaaacttaatcacataaaagcatacattttacacatacagctctctccatcttccacaatagattaagacataaaacataaccagtatttttgaaaagcccccttaactggcatgcttcttactgaaattatcataaaaggttcgtatgagaaaggattccagaatatcccttaattgtgttgtagcttatgcatttctatttattttatacattatttaattcatgtgagttacttacctggcagggaagatatgatcaccaaggtgcctttcacattcattgcactctggatgtgctgacccctgcaatttccccaaatgggggaagctcaactgcataatttgtgatagggggactgtgtggcactttcctctggtcttcgtggtttaagaacaggttttctctgcttatttttattaaaaaaaaaaaaattatgtgagtcagtggttctcaagcagcagtgattgtgccccctaggggacatttttggttgtcagaacttggggcatgttgctattggcatctattgggtagagggccaggatgctgctaaacatcccaaaatgcacaggacagtcccccacaacaaagaattatccagcccatactttcagtagtgtcaaagccaaggaactgtggtctatttctatatggaaaactattttattaatatttcagttattttcaatgaggatttaatgaattcagcatactctttgatgacctaaaatgggactatgagatctctaaaaaatatttcatgacatatatattaaaaacgtggtaaaattttagttttaaacgttagttttaaacatgaattataaacattcatggcytgtatgtcattggcattgactgtactagagcttcttaaatgaaggagtagaggacccttctttgtccccaaccgatcacagattggatgtattttactgtatttcatgtatatctcatttatataaaatacactaaaaatcaattactttaaaaatgagtctgggtacagtggctcacgcctgtaatcccaacactttgggaggcccaggcaagtggatcccgtgaggccaggagttcacgactagcctggcaacatggcaaaaccccgtctctacaaaaaatacaaaaaatgagacgagcgtagtggcgcatgcttgtgttcgcagctactcaggaggctgaggcaggagaatcacttgagcccaagaggtggaggctgtggtgagctatgctcacgccaccacagtccatcctgggcaacaaaatgagaccctgtctcaaaagaaaaaaaattaaaagtgaaatacacacacacacacacamtactactcaccagtcaaaagaaatgaatgatccataccggcaacaacttggatggatctcaagggtatgatccttagtggaaggggaagtctcaggtttcatactgtatggctccattgagataatatccttgaaacagcaaaattatagacgtagagaacagatcagaggttgccagggtgagggaaaagggggtacagctataaaggggtagcatgaggtagtttctgtgtgctgagggaatagttctccatcttgattgtggtagttatactatacatgggattaaattgtgtagaattatattctacccccactcctccacctgtcccacatacccacaagtgagtacatgtaagatctgaataaggtgagcggttccattaacaataatgtacagatgtcattttctggttttgggattgcactttagtaagatgtttaccatttggggaatctaagtgaagggtacacagggcactgtgttatttttataacttccatgagtctgaaaacaaatagaaacatatgtatagaaaacactactctttgtttttcattattagactctacagacattaaattgttacattgatacaaaagcttgtaggtgtttactctctatccttagcatgctggagactgagaacagtgggaggacaccaatcagtgcccacactaggcactagttcctgaactccactaggaactttcacaaaaatgttactttccttaatgcgtttatttttatgatcacctgtaaaatcggggactatcataggagatthttttttgctgttaccaaataagaaaactccattatcttttttataatgtcccctactttcaaattatttataagttttttttatcattttcctcttttaaattatctttattggttctcttcccccatttttttttattaagagagctttataatataaaaaatttatattgcctgggtgtggtggctcatgcctgtaatcccagcactttgggaggccgaggtgggcagattacttgagttcaggagttcaagaccagcctggccaacatggtaaaacccggtctctacgaaaactacaaaaattagccggttatgttggctcacacctgtagtcccagctacttgaggagctgaggcaagaatatcgcttgagtccgggagttggaggttacagcgagctgagactatgccactgcactgcagcctgggcgaccaagtgagacgctgtctcaataaaaataatagaaatttatatctttgtccaattgtgtatatttcttttctttttctttttcttttttttttttgggacagggtctgtttctgtcgcccagagtgcagtggtgcagtcatagctcactgcagccttaaactccggggctcaagtgatcctcttcagcctcctgagtagctgggattctaggcatgtgccacgatgcccgactaatttttttatttttattgtttttattttttggagacagagccttgnnnnnnnnnnnnnnnnnnnnnnnnnnnnnnnnnnnnnnnnnnnnnnnnnnnnnnnnnnnnnnnnnnnnnnnnnnnnnnnnnnnnnnnnnnnnnnnnnnnnnnnnnnnnnnnnnnnnnnnnnnnnnnnnnnnnnnnnnnnnnnnnnnnnnnnnnnnnnnnnnnnnnnnnnnnnnnnnnnnnnnnnnnnnnnnnnnnnnnnnnnnnnnnnnnnnnnnnnnnnnnnnnnnnnnnnnnnnnnnnnnnnnnnnnnnnnnnnnnnnnnnnnnnnnnnnnnnnnnnnnnnnntgttggccaggttggtctcaaactcctgacctcaggtgatccacccacctcgacctcccaaagtggctgggattacaaacttgagccaccgtgcccggactgtctttattatttttccagacaagatcttgttatgttgcctctgctggtctcgaactcctggcctcaagtgacctttctgcctcagcctcctgaagcagtgggattgcccatgagagccaccactattgaccatgtatgcttctctccatgtattttaatgtaattttatcatatgtgcacttttgaatgctacccttttacttaattttcatttttgaatgctgcccttttactttgatatattaatatcggccaggtacggtggcttacgcctgtaatcccagcactttaggagcccgaggtgggcggatcacctgaggttgggagttcaagaccagcctgaccaacgtggagaaaccccatctctactaaaaatacaaaattagccaggtgtggtggtgcatgcttgtaatcccagctacttgggaggctgaggcaggagaatcgcttgaacccaggaagtggaggttgcagtgagctgagttcacgccattgcactccagcctgggcaacaagagtgaaactgcctcaaaaaaataataataagatatattaatatcaagtcacatcaaatttatatctatactgtggtcactccttctcttactagtgagtttggggtttttttccctcaaaattttcttggatgtcttttttcctgctttctgtatgtgtctttccaggctctatcatcaatttcatacttgtatccccctctatttcctttacttgcagctatcactaccttctgaatttgtgataaatcctgtgtcctcagttctaccttctttgttgtagttttaatttattttttattcataaataatgggacatttctaattggatgatttttctaaatttttcctttaggaatttaaactttgggataatgagctgcagtatgtggaccaacttctgaaagaggatgtgagaaataactctgtctggaaccaaagatacttcgttatttctaacaccactggcwacaatgatcgtgctgtattggagagagaagtccagttagtaatctccttcacttgctcattcgttacaaacatgtttgcatgcctaccatatctcaggcactggggatacagcagatcaagatcctaccccatggaactaaaagaggacagagtactgagtggaacataggatgatagatttacaaataatgtagcatacttctacttcattgtatcttaagtttcttgaaatattgctactggagattggaaagaaatcttaatgttatggggtattgtctaagaagctttattttaaaaccatctcattaaattttgttgcattttagataatcgtccccagatgccatgttaccctagtgcagagtttggggctggataagtttttgttgtaggtggctatcctgtgttttgtagggtatttagcagcatcctggccttaaaacaaaaatgttttcagacattgccaaatgtcccccgagcggtaaagtcacccccaagttgagaaccgctctatacaaagagctgttattagagctagacatttctgaattggcatcaatttctatattgtatccataaacattagtagccacgatttttgtgaccttatttgtccattgtgtctgagtgtctgttttacaatttgaacaggcttgttgttttcagagcctgatgagatgggagtcataattttagtgtaaatgtgtttgaacaactgttgagtggagctgatttgtatagtgcatctcctctcttccaagctcttgattttgcctggatcgaggcagcttgctcttcttttatctgctctatacaggattctggtgacttaaaatttataaaaggctttaatccatgtctcaccttaacactctgctctgggcttttgtctggagcgtgcactacccctcaagcacacttcatgctttttttctagtgctctcctatataaagctgtacaggcatacctggttttttgagccttgtatatattatgttttttttgtttgtttgttttttgttttttttaacaagttgaagcatcttgagcaatcttgagttgagcatgtcttcattgccattctttctaacagcatgtgctcacttgtgtctccgtgtcacattttggtactcctcagtatttcacattttttcataatcattatatctgttccagtgatttgtgatcagtcatctttgatcagtcatctattgtaattgtttgggggtgccactaactgcacccatataaaacagagaatatcactgttgcatgtgttccaccatctctctccctcacctcaggcctccctattccctgagacacaacaatattgaaattaagccaattaaccctacagtgtcctctgagtgttcaagtgaaaggaagagtcacagcctctcactttaaatcaaaagccagaagtgattaagcttagtgaggaacacatatcaaaagctgagataggtccaaagctaggcctcttgcaccaaacaccaaactcataagaaagagttcttgaaggaaattaaaagtgctgctccagtgaacacctggacaaaacagcattattgctggtatagagaaagtttgagtggcctggataaaagataaaaccagccacaacattcccttaagccaaagcctaatccagaggaagccctaattctctttaatttgatgaaggctgagagaagtgaggaagctgcagaagaaaacttggatgctagcagaggttggttcatgaggtataagaaagaagccatctccatagcatggaagtgcaaggtgaagcagcaagtgctgctggagaagctgcagtgagttttccagatcccgctcagatcactaatgaaggtggctgcatgtaaacagaagattttcagtgtagatgaaacagccttctattggaagaagatgccatctaagacttttcatagctagagagaaggcactgcttcaaagcttcacacagctggctgaatcttgttagggcccaatgcagctggtgacttgaagttgaaaccagtgttcggtgatgattctggaaatcttagggcccttaagaattatgctgaatctcctctgcctgtgctctataaatggaacaacaaagcctggatgacagcacatctgtttacagcatggtttactgaatattttaagccctctttgaggtctgttgttcagaaaaatttcttggaaaatatgattgttcatggacaacggacctcatcacccaagagctctaatggagatgtgcaaggagatgctgttttcatgcctgcgaacacaacatccattctgcagcccatggataaaggagtcattttgattttaaagtctcactatttaagaaataaattttgtaaggctatgagctaccatagatagtgattcctccaatgaatctgcagagtcaattgaaaaccttctgggaagaatttaccattctaggtgctattaggaatattcgtgattcataggaggaggtcagaataccaacattaacaggagtttggaagaagttgattccagccctcatggatgactttgaggggttcaagactttagaggaagaaggaactgctgctgtggtggaaacagcaaggaaactagaattagaagtggagcctgaagatgtgaccgaactgctgcatcaagacaatacttgatcagatgaggagtcgcttcttatggatgagcaaaagaagtggtttctcaagatggaatctaatcctggcaacgacgttgtgaaatgacattgttgaaatgacaacaaaggattttaaatattgtaaatattacctgaacttagttgataaagcagcaggatatatgagaggattgactccagttttgaaaagttttactgtgagtaaaatgctatcagacagcatcacatgctacagagaaatcttttattgttgtcttattttaagaaattgccacagccatctcatccttcagcacccagcaccctaccctgatcagtcagcagccatcaacatggaggccagaccctccaccagcagaaagattacgacttgctgaaggctcagatgatcattagcattttttagcaataaagtattttttaattgaggtatgtacattgtttttttagatatgatgctattgcatactagactacaatatagtgtaaacataatttatatgtgctgggaaaaagaaaagtcgtgtgacttgcttaattgtgataaaattgctttactgaaccttccatatctgcaaggtattcctgtattgttcagtatggtagctactagccacatatggctatttaagtttcaatcggtatgattataaaaaattaaaaatacaattatttcattgcacatgtcctattttgggcgttcagkacgtacatgtggctagtgactaccatattggacagcacatacaaaacatttgcatcatcactggcagttttattgaacattattcgtctaaagattgacagtagttagcggtaacaaagcattttaaaaattgaatatgaagagttttcaaaatgcaaacgtttagccttttcagaggcagatcactggcttyctgttgccaaatagaaacagaaataattacccaagaatctaaaagagcttcctatacttaggatttattttccttttaagatgggtaaaagaagtatttaaaatgtgaagagtagctgtaggtatctagaatttacagtttgttaaattttttttaactctaagcatacacagatagatgtacataattatttttgtcatttttttctttttattataaaagtaatgcaatgtagttatgggggggggaaattgtactaaattctataaagtaaaaagtcaaagtcttttactgttcttcatcccacatcccattttccagagtgagctataattgggtgaatttttccaaactttataaatacacttgcaaacatttatacacagcaacctagataataatgttacaggcattgccttttcagttaatgtgtcatggccctttttctagactatgagtgcatagtcttctagtactaccaataacagcatttatcaagcatttactatatgccactaattctaacagctctgtgagacacttcatgaagaacttgaggttccaggtaattctgtaatttgcccaagagcacataatttatgggaccaggatttgaagcgaggcagcctgacctcaaagttcatcggtctttttgtttgtttgttttcctaagagacagggtttcactctgtcacccaggctggagtgcagtgacggatcatagctcactgctgccttgagctcctgagctgaaggaatcctcccacctcagcctgcgagtagctgggactacaggcatgtgccactgcatccagctaattgttaarattttttgtagcgatgaggtctcactatgttgcccagactggtcttgatctcctggcctcaagcagtcttcccgctttgatctctgaaagtgctgggattacagatgtgagccaccatgcccagctaaagttcatgttttaaccataaaaataggtaatgctttagtacacatgtatgtaaataaaaatttagatattgccaaaatgaaattaagaatcttaaacaaggaccagctaagacctgcggggacatggtttcgcaaataattggaaacattaagtcatgtaaaagtagttggaaaagtatttttataatgttgaatgagtttattattactctgtggaaaaaaaaaaattatagtaacagcactgcagcagaaccaagactaccaagctttagtcagtgacttactcatctgagcaattatgtggtaaagcaagttctgtggcttccttgggatttgtgataattgagtctgaattatatttaatctgtttaaggggaagataaaggtatggagcacccattttgacagggaatcacatcacagtttactagtcatcttgctttggaatataagaaatacattcttgtgttgatttttcatttttattctttgcctawgtaatttccatgccattttttaatgatagctaaagattatgtaaattctcctatttcagtgactagggatttgttgggacgtaagtagagcttagactgtttycccaaggttgctttaccaataaatggaaagtttccttcttttagctgatgtttccttcaaaaggaaaatcttccatattatttaaaggaaatattttatgttcctttttttcctattgtgaattgaagcttttagattagttttgtgtccttccctagaactgaattgacagctgcagccttaagggattctcgtgatttaaatatgactgagagaggtgccacagtacactaagaaacgctgacacaagtgaaagtgtgtttacaaagctgtgccacagtcttagtaaaactgtgtcttggccgggcgcagtggctcatgcctataatcccagcactttgggaggccgaggcaggcggatcacaaggtcaggagttcaagaccagtctggccaatatggtgaaaccctgtctctactaaaaatacaaaaattagctgggtgtggtggtgggcgcctgtagtcccagctactcgggaggctgaggcaggagtatgacttgaacctgggaggcggaggttgcagtgagctgagattgtgccactgcactccagcctgggtgacagagcaagactccgtttcagaaaaaaaaaaaaactgtgtctcatcattgcactgttcttttaaaattgtatatatatatttttcttgcagatacactctggaaatgattaaactagtaccacataatgaaagtgcatggaactatttgaaagggtaagaggttgtttttgctttttttatatataaaaaagaagtggctatatgatgcatcatggagtgtattccataatcagattccaaaaggatagtaaataatttttcatttttctgaacctaagagcagaagtataacagcattatggaaactctctgggagtttgcccttctatgcacctcccaagtacctaccaacactgttttcagaataatccaccagtaaataatgccattttaattgtatttaagaatcctgtagtctttatatcaaagaatggaacacacacacccccaggctctagttggctcaggaacacagtaaagcggggtagtttacaggtagattttgccagtgggcagccaacctttctgttttcatttctagagatctccgccttcaggttaacctactcctcaactagaaaaggtttcacttgcctggccactgacgtaactaagctccttgttgaacataagaggtcttcaaggaaactaggctcaaagagcacaaagtatggaaccagttacccttggggatgtgtcaggggaggtgcctgtagtatttggagagctcgagggatgagaagccatctcaagagaagacgagggctgggcatgttagctcatgcctgcaatcccagcactttgggaggccaagatgggcggattacttgaggctaggaggtcgagaccagcctggccaacatggcaaaaccccgtctctactaaaaatatacaaattagctgagcatgttggtgcacacctgtaatcccagctacttgggaggctgaagcacgagagttgcttgaacctggaggtggaggtcagagtgagccaagatcacaccactgtgccccagcctgggcgacaagagaccctgtctcaaagaaaaaaaaaaaagaagaacatctctcctggttttgtccttcactttttaagatgatttattttgtgtgttgtacagtttaagttataaatgaacacttttaaacttcatttttaaaaactttttctacttagcttgtaattatcctttttttttttttttttttggagacaggatctcactctgttgcctaggctggagggcagtggcatgatcgtggcccactgcagtctcgatctcctaggctctagtgattctcccacctcagcctcccaagtagctgagactataggtgccaccactaggcatggctgatttttaaaaaaattttagtagagacgagatcttgctattttacccaggctggtcttgaactcctgggttcaagtgttcctcctgcctctgtttcccagagtgtttcccaggcatgagccactgcacctggccagctcttaattaactaatgatctatgataagactcatgtaatttaaaagtttcattatagtttcagcgtcattcattcaaaataactctccttttcttgtttgtgtttcagggtttattttctcttgatctttctactgcttttgttcttccttcacaaaatcaagtctttgttttttgttgttgtttacaggattttgcaggatcgtggtctttccaaatatcctaatctgttaaatcaattacttgatttacaaccaagtcatagttccccctacctaattgcctttcttgtggatatctatgaagacatgctagaaaatcagtgtgacaataaggaagacattcttaataaagcattagaggtaagctggtggggctcagtgctgtcatttttggtatctcagaattgatctgcccaataccactaatatccatgtcccctttcaacatcgttcctcagaattcagtgcagggctatttctggttaggggcagcattgacatcacttggcaacacagccggtgactcttaatagtgtgtcttcatttgaatgtgatttgagttaaattgtattggctcaaaggcatttgcgcttgaaattgaattacatattactttaatttttatttttcattttcagttatgtgaaatcctagctaaagaaaaggacactataagaaaggaatattggagatacattggaagatcccttcaaagcaaacacagcacagaaaatgactcaccaacaaatgtacagcaataacaccatccagaagaacttgatggaatgcttttattttttattaagggaccctgcaggagtttcacacgagagtggtccttccctttgcctgtggtgtaaaagtgcatcacacaggtattgctttttaacaagaactgatgctccttgggtgctgctgctactcagactagctctaagtaatgtgattcttctaaagcaaagtcattggatgggaggaggaagaaaaagtcccataaaggaacttttgtagtcttatcaacatataatctaatcccttagcatcagctcctccctcagtggtacatgcgtcaagatttgtagcagtaataactgcaggtcacttgtatgtaatggatgtgaggtagccgaagtttggttcagtaagcagggaatacagtcgttccatcagagctggtctgcacactcacattatcttgctatcmctgtaaccaactaatgccaaaagaacggttttgtaataaaattatagctgtatctaaaaacaatgccatagaagtttgattttttaatagcattgaactatatattatacaagacacattgtctcagcttagaaaagcatttgagaaagaaaatattgctataaaactgtaaactagaaacatgatgtgttggaggaaatgttaaaatgtaaattggtcagttcttgactgaaagtgacaaaatccactcaaggtagtttaaacccaaagggtttattcaggtttataaatatctcacagaagaattgcctgatcttttagaaagacattcccaaaccatgctacacaactggaccgtcccgttgctgctgcctgtgccagaatcaggaaactgctggatgaggagtgaggaagccacgatcctggctgccagctccaggactgtgctgtgtctgcacgttccacgcaaagcacatctgctgcttttcccatgtagtgtggttccaaattaaaggctcactgcagtgcatctgattggaaggaaccaacaggatgtcttaaaagcttaactgcagaggaatctgggaagtgtagtttgtagctttctagccttttatgatgcaggacgccatgccaggaaggagttgggagtggttagcaagctagcttgctgtacctgcacttaatctcactttatttatttttatatattgattttttgtttacaaggagtcccactctgtcacccaggctggagtgcagtggcgtgatcgcagcttactgcaacctccaccgcccaggctcaagcaattctcctgccccaccatcccgagtggctggaattataggtgcccgccaccatgcctggctaatttttgtatttttagtagagacggagttttaccatgttggccaggctggtcatgaactcctgacctcaagtaatctgcctgcatgggcctcccaaagtgttgggattacaggcatgagacaccaggcccggcctcagtctcactttatctgtaatttttgttcaatgtcaaagcaccaaaatacaactaaggaaatcatacagcgttacatagtcatcctttctcaagataaatttaggaaataatattttaatactttttgaagaaaatatatgtagtgttatttctaacattttacatgtttttgttatttttagaatccaaaaatttccagttttatttttgaagctgccataaagtgccatttccatgtagaccatttcaaaggtgtcataaggatcaaaagctacatagaaaagttctcataagatagcaattactctctgccgggcacgatggctcacgcttgtaatcccagcactttgggaggccgaggcgggcagatcatttgaggtcaggagtttgagaccagcatggccagcatggtgaaacccccatctctactaaaaattcaaaagttagccaggtgtggtggcaggcacctgtaatcccagctacttgggaggctgagacaggaaaattgcttgaacccaggaggtggaggttgcagtgagctaagattgtgccattacactccagcctgggcaatagagcgagactcagtctcaaaaaaaaaaaaaaaaaagcaattactctcagaaactataatcggtgacccaaaactgattggatttgggactttggactcaacagagctcatagagacagcttaataaaaagcatagtgaggccgggtggagtggctcatgcctatagtaccagcactttgggaggccgaggcaggaggactgcttgagccctggaattcaagacctgcctgggcaacagcaagatctcatctctacaaaaatattttttaaagttattagtgaagagtggtgtgcgcctgtagtcccagcaacccgggaggctggggtgggaggatcacttgagccagggtggtccaggctgcagtgagccatggtcgtgccactgcagcctgggtgacagagtgagactgtgtctcaaaaactgtttaaaaaatgagtttgtcatttcaaggaaaacaacggaatgttgccagtgataaaatgtgagctagcttgcttgcctttttttttttttttgagacggagtttcactcttgttgcccaggctggagagcaatggcatgatctcggctcaccacaacctccgcctcccgggttcaagcgattctcctgcctcagcctcccaagtagctgggattataggcgtccgccaccacgcccagctaattttttgtatttttagtagagacagggtttccccatgttggcgaggctggtgttgaactccagacctcaggtcatctaccagcctcggcctcccaaagtgctgggattacaggcatgagccannnnnnnnnnnnnnnnnnnnnnnnnnnnnnnnnnnnnnnnnnnnnnnnnnnnnnnnnnnnnnnnnnnnnnnnnnnnnnnnnnnnnnnnnnnnnnnnnnnnnnnnnnnnnnnnnnnnnnnnnnnnnnnnnnnnnnnnnnnnnnnnnnnnnnnnnnnnnnnnnnnnnnnnnnnnnnnnnnnnnnnnnnnnnnnnnnnnnnnnnnnnnnnnnnnnnnnnnnnnnnnnnnnnnnnnnnnnnnnnnnnnnnnnnnnnnnnnnnnnnnnnnnnnnnnnnnnnnnnnnnnnnnnnnnnnnnnnnnnnnnnnnnnnnnnnnnnnnnnnnnnnnnnnnnnnnnnnnnnnnnnnnnnnnnnnnnnnnnnnnnnnnnnnnnnnnnnnnnnnnnnnnnnnnnnnnnnnnnnnnnnnnnnnnnnnnnnnnnnnnnnnnnnnnnnnnnnnnnnnnnnnnnnnnnnnnnnnnnnnnnnnnnnnnnnnnnnnnnnnnnnnnnnnnnnnnnnnnnnnnnnnnnnnnnnnnnnnnnnnnnnnnnnnnnnnnnnnnnnnnnnnnnnnnnnnnnnnnnnnnnnnnnnnnnnnnnnnnnnnnnnnnnnnnnnnnnnnnnnnnnnnnnnnnnnnnnnnnnnnnnnnnnnnnnnnnnnnnnnnnnnnnnnnnnnnnnnnnnnnnnnnnnnnnnnnnnnnnnnnnnnnnnnnnnnnnnnnnnnnnnnnnnnnnnnnnnnnnnnnnnnnnnnnnnnnnnnnnnnnnnnnnnnnnnnnnnnnnnnnnnnnnnnnnnnnnnnnnnnnnnnnnnnnnnnnnnnnnnnnnnnnnnnnnnnnnnnnnnnnnnnnnnnnnnnnnnnnnnnnnnnnnnnnnnnnnnnnnnnnaaaaaaaaaaaaaaaaacaaaaacccatcagaataatcttataatacttttgtattaaaccaccaaacatattttaaagaactcaagaaaaagaaggagagtgtatcgcatttacccagttatttatattctctgttattctttcatttctgttattctgtccaaaaaactttctcttttttttgagatggagtctcactctgtcgcttaggctggagtgcagtggcgtgatctcagtatcactgcaaactttgcctcccaggttcaagcaacctcagtgcctcagccttgcgagtagctgggattacaggcacgtgccaccacgcccagctgatttttgtatttttagtagagatgggatttcaccatattggccaggctggtctcgaactcctgacctcgggtgatctgcccgcctcagcctcccaaagtgctgggattacaggcttgagccaccaaagaactcttttagcagttctgttagagtaggtctgcaggctacaaattctcttagttttccttcatcttagtttatttcaaggttattcctgaaggatgttttcactgcatatggaattctgggcttgcaattcttttctttcagcacttgaaaaacgttgtgccactttggtcttcatgatctcagaggataaattcactgtcattaggattgtgggtcacctacagctcgtggcatttctctttggctgttttcaattttttttccttgtctttatttttcagcagtttgattttgatgtgtctgggcatggatgtctttggatttattgcatttggggtttgctcagttttttgaatctgtaggttggtgtttctttcccaaacttgggaagttttcagccattatttcttcaaaagctttttagtgctttctttctcatctgctttgggattctgatggcataaatattagaccttttgttatgtcccacaggtgcttgaagttttattaattttcccctcctctctgttggtcagtttggataatttctattaatctgtcttcatgttcactgactcctctgtcatttccattctgccattgaatctatccagtgagttttaaaatttgattattgtacttttctattttaaatgtttatttggttcctcttactttctccaagttttttactcatactttcttttttaaaattattattttttatttgtttgagacagagtctcgctcggtggcccaggctggagtacaatggcacgatctcggctcactgcaacctccacctcccaggtacaagcgattctcctgcctcagcctcctgagtgcacctgccaccatgtccggctaatttttgtatttttaatagagacagggtttcaccatgttagccaggctggtctcgaactcctgatctcaagtgattcgcctgcctcagcctctcaaagtcttgggattacaggcgcgagccactgtgcccagccccatactttctattttaacttttgtttcaagaatgtttataattttttgagcattttcataactaatgtctttttcagataatcctaacagtcattttatagttggtgactcttgattatcttttcccatgcaagttgagatttttgtgatggttcatatgcctagcaattttgtatcctgagcattttgaatattatgaggctctaattcttgtttaaatcctatggagaatgttggcattttaatttttttttttgagaaggagtcttgctctgtcactcaggctagagtgcagtgctgtgatctgggctcactgaaacctctgcctcctgggttcaagtgattcttgtgcctcaaccttccgggcagttgggattacaggcatccgccaccatgcccggctattttttttttttttttttttttaagtagagaccgggttccaccatgtttaccaggctggtctcaaactcctaacctcaggtgatctgccctccctaagtgctgggattacaggtgtgagctaccgcgcctggccaacagtttaatttaagcaagcacatgaactagttagggacagcctgcaggttccgatcttcttctggggttcatgttccaaagtgagttctgtgttcataccctctgtggggctatttggatctgtctcgtggctgcatcctcccgtagtttggtacctgaacaaaaatctgttcatgagcacagttctctgagtgtttggtgtgctcgttaagtcgatgatacgcaggtcagcgatgagcccaagagttcaaaaacaactctgtgaggttgcttgccagatgctctcaccttccgctatcttctcagtgtttttaggttccctcaggtttcagtgcgctggtctgaaacttcccactttcagtttggcttgggggagctgcccacttccacaattgtgccacagcagtgggaaacagttaaaaacaacaaaacaccaagtttgtgtctgtcctcttggagctgcagtgctactgaatggaaaggactatctctttccctcagacttttggctgctgaagctttttgctctggccttgggcttgactgggggctggagtgcaaagaaaagaagaaaatagaaagaacagggaattttcttcactccctctgagggttaggagtttccttttctgctccacgagccagaatcagagggtttctcccgagtctctgtgtgtgcccccgacactcagttccaggctttggactaccttcagcttgaagatgggtgacacaaccagtttgatggtgcgtcaaattctgctgttctttttatttttaattttttgtttgaatttaattcctctaatttttcatcagtgttaaaa

SEQ ID NO: 94407 - DNA, 14614 bp, Homo sapiens
gtaataactagtgacaatgaagataataaagtgttcttatgagcccaagagttgatatttctaagtttcacggcatagctgatgaatcattcagtaaaaccaaatgaaacaaataccttcaatctctcaaatcaaacaccatactgttgagattttagctataactttatgtttgccttgtttgaaaaagtattttaaaaccccaaaatattttttgttaaaccttcttaaatggttaaaacattccttttagagtaaacacttatgaaatgcttaagcattgtaacctcgtcattctaaaggattaaaatgtttattttaaattgaacatttatgaaatgcttaaacattttaactagccttttttaaagtgcaatcataaaaacactgtttttataatgaaagaaatatttcctaattgcattcacacatttgaactatttagacatgaggcaataaagtgaaatacaattgtgaaacacatattttatgtaaagtatagttgccaaagtttttgtcatcttgaaataatctttttatacttttttgcttttaaagcataagtttgtggcacaagttaagttgattctggcaaattgtagttaatccccgactacttttcatgattagatattcagctaaggtatacatcacagaccatctgtgagaagacactatttcatctgtcttctgggtaatagggaggctcattttgaggatggacccaccgtgtttttttgtgaaagcaggagagtgccaggtggttgctacagataaacacaaagggtaataccagagaaaaagaaacgcagggctttgccagcaaacctttacaatattggtgcactacaacaggtggtaaacagtgagatgtcatatatgtgtacaaagccagaatacatttcacaatttgtagctcagattccatgagacactaagaatacagatgttaggaagtttcaaatttcaataagggtagaatctaataccaccgtgaaaataccctttctcaactgcatgtacttatattgctaactggagaaaatagctctggagagtaatcatggaactgtgcggagtttatttggttaatgggaccaaacatacaattaggtagaagaaataagttcgagagttcaatagcactgtaaggtgactagttactaatttatcgtatatgtcaaaatagctgaaggtgaatatttgaaatgttcccaaaacaaataaataataaacctttgtggtgatggataacctaaatatggtgatttgatttttacacatggtatgcatgtatcaaaatatcacatttacttgttatagatacatgagagttgtactatataaatatgtacaactcttgcatatccataaaaagtaaatacatgaatagattaacaaatagaacaagaaaaaattattagtacagaatagttagcctttttctaagtttcatgagaaatctgcaaatttcctagggaaacttatgatagcctattaacatgcaaatataatgtattagatctaacttttaaaagtaaaaagagatttttttatcatcctgaagaagaaaaagaacttttaccaaggttttcttgtcccgggctcaccatgtaatgatgaaagcaaactggagtagaaagtaaggcaaagaaaaataaatacatatttttttcagtggtctctaagcatcttaaactttgttatctctcatgtctagctttattccaggcacaaactgatcaaaaattggttccctgaatgagcttgccatatcagatacagaaattttaagatttgctaattcaaagtacaagaacacagtaaatagtaagagaagacatgagcctgtcagtatattaaattcactggcatgcttttttcatctatttcccttcagaatctgttacaaaacctagagaaatgtgactcctacgagccactgttatgcaaaggtgtgccagactcattgtgtttagggcagaaagtgtagcctggagtaaaaaaataaaaaataaagattttaagtccaagaatgctcaaatgtattaagtattatgatgtattaccaaattttgattgctgcataaaatacctctttgtgacaacccagtttacatgcaatttcaatgatgactattagagaactattaagccgagcaggtcatgtagcttagggtaaacctcatgacctcatctgttggaacatgtgtcgataggatagaccaaggcaaaggctgggcgcagtggctcacgcttgtaatcccagcactttgggaggccgaggcgggcagatcacaaggtcaggagatcgagaccaccctggctaacatggtgaaaccccagctgtactaaaacatacaaaaaattagccaggcgtggtggtgggcgcctgtagtcccagctactcgggaggctgaggcaggagaatggcgtgaacccgggaggcggagcttgcagtgagccgagatcgcgccactgcactccagcctgagggacagagcaagactccgtctcgaaaaaaaaaaaaaaaaaaaaaaaggatagaccaaggaaaaaatatgctctgagtaagaggtaagcacggaggatcaattcaaaatggtcccaaatgaagatgccttttgagtatatgtcagagaagtgaagacaatgaatagttccatgcaagcaattcaagtgagaaagggcaatgcgtaaggcaaaataaatgagatgagaagcaacctttgcccacaaagagcctggtaagaagattttttttgtaagtcttgcttatttttcattagaaaaaaaagttagaggcaaatctttttatttaggcatattataaaaatatttctgtatcctcactatgaatgagaaaataagcataaactcaaattataaaaagatccaacaggcaaaaacctatgtcatatgtttgtttgaggttgatactttaaaagaaattatctacccacaagatggggagaaaataaatagaaatctgtttttctccactgctttaagaatctatactgatttcaactctcttagacaaaatttcacatagaccacatgcatgaaaatttttatgctgccattataccttatatggcaaataattgctatagccatacttattttactctgttgagctaaatacatttttaccaaaaaatagtatgtatcaaaatcttaaatgctcacatttaatgggaaaatggaataacttacatgcactataattctcaacctgtttagtgcaaaagatctgaaaagatgaaaaaagtttagagagagcaatcacaaatagaatagaaaggaaaattcaaaatgatgtcaagataaaaactagaatattagctgcaggacagcaaaaacttctgtcttttattttttaaactactctcaccctggtactcagaattttgtttggacacagtaagcactcaatagatttattgaatgagtaaacacattttaaaacatcaaaattattacctgtattacagtgaaaaaaatacctaatgaccttctacaatgtgccattctttatgcaaagtactttatatatatcagcctgtataatcactgttaaaaccaatgagaaagacaataatttattgatgagaaattggaagttcagatctattaagaaagtcatccaaagccatgctgacttcaaagtacagactctttactttaggacatggcataacccccagagggtaatgatattgagaaagctttgccattggaaacacaatttcatagacaagaagagaagrttatgttcacattacttttcatgcttcacatggcaagaacattcygctctttaatgttaggattcataactttccctaaatactctgtgctctgttgtctaaatggtaacaccaagaatcatcacttttcctccataataggatgtgcagtgtctttgtgtgaaatatagtctatagttgtatatcttctagttgagaaatttaatcatgcaatatatctggaataagaaaaaaatacagcaacaattaaaataggacaataaaaatgagtaagatgtttaaatttctattgccagaaaaattgtggaaaatagaattcatgaaagagaaatagagtggcataaaacaactgcaggggagaaatgatgaaaacagagaaagaaagagataaactagtgaaataaagttgaaaaaagctttattttcacagcattgcattttgtgaaaagtcttacacttttacattaaagagtttaagagtatactaaattgaatttgtttttgacttgatgtttctgctttaaattatatcaaggcttaattaccatttaaaacttactattagttaatttatatatcattactaatgtcagcatcttgtcaggcataagagttaaatataaatttatattccccaggtgaacacaattgatacaagaaaaaaaattactaatcaagaaaaaaaaaggagttcctttctctaaatgtatcacatagtgatacagctttttatacactacaaatagactgggtcagaagttaaagaaagtagtttgtcttctggaaaaattataaatcatattttattaagaaaaacaaaaaactgtactcaaattcgggataggatcaatcaatattttctcttaaatttacagttgacaaaaaattggaaagaagtaatagaggactttttggtgttttattattgttatgtgatattattcctgatgactctagaattaacttcactttaatctgttcaagtgtcttactcccacaagtgttccttcctcaggattataaaatgtaccccctttactctatcatgcttattagcatactgtctcatatgtttcatgctgtggaacctcatagaatttatagcaactattacaactcatttataacttttttttttttttgagacggagtcttgctctgttgcccaggctggagtgcagtggcgtgatctcggctcactgcaacctctgcctcccgggttcaagcatttttctgcctcagcctcctgagtagctgggtagctgggattacaggcgcccaccatcacacccggctaatttttttgtatttttagtagagacagggtttcaccatcttggccaggttggtcttgaactcctgacctagtgatccaccagcctcagtctcccaaagttctgggattacatgcataagccacagcgcctggccctatttataacactttttaaagttctcatactttttttttttttttttttgagacggagtctggctctgtcgcccaggctggagtgcaatggcgcggtctcggctcactgcaagctccgcctctcgggttcacgccattctcccgcctcagcctccggagtagctgggactacaggtgcccgccacctcgcccggctaattttttgtatttttagtagagacggggtttcacagtgttagccaggatggtctcgatctcctgacctcacgacctgcccgcctcggcctcccaaatctactcttttttatatttctctgctcttattcacacttgaaccctatctaatgagtgtcttatcgctaccacattcctgaaaccacactgtcaatgaccaaatcactaaatccaatggtcaattttccatactcatgttgcttgaattatcagcaacatttttgtttctttttggagacaagatcttgctctgtcactcaggctggagggcagtggctcactgtagcttcaacctcctggattcaaatggtccttccacctcagcctcccaagtagcagcagcatttcatacagttgatgactctctccttgttgacaaaaatatcctcattgtattttcagttgacaacactctccaggttttccttctacctagtttcttaatctcctttgcaggtacttcatactgtctaatctctaaaccttggggtaaaaagggttcaggactcaggtgtacattttttctctatctaaactcactccatctcttaataacatcatctaggtcgaggccgacgtcgcttccggagcagcatggcggccactgaggaggagagrctagcagggagcggtgagggagagcggckggatttcttgcgggatctgcacgtgcgatttttccmgcgctgcctcgaggwtttgccggagcgctgttcttcactygagacaagcaggtctttcccacagaagrcagatsaaatctaaatcgctgtggtttccgaggctcttcatacctgggtattcykttcaatccatcaaaggctcctggaacagstcatccttatgatagtggccacatygcaatgacctacactggcctttcatgcttasttattcttggagacgacttaagccgagtaaataaagragcttgcttagcaggcttgagagcccttcagctggaagatgggagtttttgtgcagtacctgaaggcagtgaaaatgayatgcgatttttgtactgtrcttcctgtatttgctatatgctcaataaccagtcaggcatggatatgaaaaaagccatctcctatattaaaagaagtatgtcctatgacaatggactggcacagggagctggacttgaatctcatggaggrtctactttttgtggcattgcctcactatgtctgatgggtaaactagaagttttttcagaaaaagaattgaacacgataaagaggtggtgtataatggggcaayaaaatagttatcatggaagacctaataagcctgtagacacccgttattctttttgggtgggagcaactctaaagcttctaaaaattttccaatacactaactttgagaaaaatagaaattccatcttatcaactcaagatcgcctcgtagggggatttgccaagtggccagtaatccaggtgctttgcatgcayactttgggatctgtggcctgtcactaatggaggaaagtggaatttgttaagttcatcttgctctgaatgtaagcacacagacttctgaacgccttctagatctccatcaaagctggaaaaccaaggactcttaaacaatgctcagagaatgtacatatctctacaygactgactttagattgggarggtggggggatttgtagcataactgtagctcaagtttaaaagccatgtataaccaagtgtgctctttttttaaaaggtagagtcttacaatcaaatctcctgctgatgtcactttggggtatggtcttgagccagtaatctttgtactgggtttcaagaaaatctttgttgaagtttgaaccacaactttgtcatggttcttaaatgtttatactgtatttcaaagaagttgtttgaggcaaattaagtgtatgtgtgtaggttatctttttaaaaactcttcagtgcaaattgtatcttgttataaaatggacacaaatctgcaaaacaaatttacacttcatatagcattgataatcttcaggtgaacagttagtaatcatttaaaaagctcactgctgatggtagaaaatttgctttaatgaattaagtatctgggattattctttgaaaacagatgaccataatttttttaaagaagagtgatttattttgtcttatttttaagtaaagtgtgccaattaaacctgtgtggcctatataaatgaaattaataacttcatagtaagaataaataggtttaactaatgtgatagttttctaaaaggagattgtttgaagacaactattatgtarctgagggaaaagcaactaactatatgtgattgtgaatgaggaagttttgtgttatgtgggtcatttatttagacattgctgtggtgaataccagttatgtttgattttattctcaaatcattagttgccttatttttggctttctagaaagaaaacaatcttttctatctacaaggaaagatacttcgtgtttttatttttagccatttgaattttttaatttgttgcccccagtgtgttagctgctttaatttcaaactaatasttttctaatttttttcaaattaaataagtaaaaaaatgcaaaaacagaaccattcaaatagattcagtggtgcaactctatacatggtcatttttattctcatattctcaggtaagtgagagggaaatgtaagcatttagagggtaagaaccagggttttgtttttgttcattgttttgttttcttaagtctatgaactagctaattatgaaggagatagtataaaaactcttcattcgtaattaatttccattacttgctcagtgacattcagaactatgagtctagtactgaaatagggaaagaaatctcttcactaaaggagttgggtttaagttagtcttggtgataataaatgttgaaatacaaacctcagtataaaaactagattactggtatcactgtttaggcattgtaatattttaaatgttatctttttttctaaattagagaaaaaaatgttgtaaaataacagtctttcccaagggaaacactatgtacttggagaaatgattcatttattactggcatgcttagttttaaacctgagtttgccaaagtcaactgtatgttgtttaattagaaataaaataaatcttctgatggtgggggaaaaaataagcctaataacagatgttatccttctgtgggttattccagttgctactatttaaatcatggcagattaagacatccatatctcaaactaagtcatctcttagacattggaagcggaagtagcatatacataatggctttaggactatataaaaagcccaaattcttttttctatatcatcaggaaaggttagaaggtaataaaggtagtaacagtgactgtattcatgaatgtaagttagagaaaaattccaatctaaaagtatttcagaaggctaaatattttctaactccttataatttaataccataaaattataaattttagtaagcttctaattgatatacttgtgggagactttcttgtgaaacttcatggactagtaaatgttcacattccacagcaacttaattgaccagaaaatagcaggccagtgtgaaatgtggagaaactatttctaacttttctaactagttatttccaagaaaaatatttaccgattaaataaattataagcaatatttcacatacatactttattccttagcaggagtgatataataaggggaaatatgaagtccgaaatctcaaaaagctctatttcctactccctactcgtctccttcccgtcccctaattttgtggtatttttttttagaaggtaggaggaggagctttgttttgagcatctgcatacaaataagattaatcagatcatatggcataatttaacctgtttatcatttcagtgttcttagacttgatctataatatatatgtggtattatatctttaaacatttatatttaatctaaattcatacagaaatcttgctgacagtagtatataatttgaaaactgttggacctgatcatttttgagagacagttaatgaggaggtgctctggaatcagatgacctgggtttaaatgccagatttgccagttcagcagcatgatcttggaccctaactctcccattgataaaataaggaaaatagataaaacctaacacacagagtttaggattaaatgaaataatacagataatgcacttaggatagtacctggaatacagaaaatttcaaattatagtttctttataatgatcataaaattatttttgcaattaaaacctctcttctacaacagaaagaggtcttaacagtttaacctcagggaaaatgatgacaacagtgttgttttctaatctcgccataaaaatacagagcaactaggatagtcacagacactattacaatgctagatgacaaggtatctgcatgaacttcaaaatacaactgaggacaaaccactgacccacatagtttcagcatctgtgggaggaagtagaaggaaggcagctggtttctgacagctctgcaaactggcgaacgacaacactgcccacagtttctcactacaaagtgcagtgggacaatctaagaacaggcactgaaactgggaagtgactacagaatcccatttgcagatgaatgttaaagcaatatgataaggtctgatgatcgcattagagcagtctgggttttacactgtgtacctcttgaagcttatgaaacaaaatccagtgctgaggacaaacgagaaagctaagtattgggaatctagatctagataagtattgggaagaaaggtcaagatacagagacattatatatatgtattttcatatatacatatatatatatattcttttaaatcactgtaaaaatgggagctctaaggctgtgaagtcatcctagagccactcctccctcctaaaagtacggaaaaactcatttcagttaagcggaaaaaaagagtaactgagccagaattacagtccaactccattcaaagttagtataagaaataagtagacataaatagatcaacatcctcttaaagtataataataataaaaaaagaaagctgaggtttaaaaactgaaaaaaaaagaaataagagaatagcacactcagacatgaagcacaccagaaatgaccacaagacagataaaaacctaatatttgcaaaaaagtaaaatgcaaatatgacaggaaatttatagtaattagtacaattatcagtaaaagtaggaaaaggtgaaaattaaccaagtaccaaacacttggagtaaaaagcaaaataaagcagaaggaaggaatgaataaagataaaagcaaaaaataattactagtagaaaaccaaaacaagagaggcaatacatccaagttggtgataggtagtgcggggagttgagtgagataaactaccagctaacctatttaagaaaaaaaggaggaagcacaaatacaaaaatttaaatgacaagggggaaatagtaaaacaggaaatttgtttaaattgactactttgagcaattttacacaataaattcgaaaactattttgagaaaaatacaaattgccataatttactctaggtagataaagaaagtcacaacaaaccaattaccatagaagaaacaaatacttaaaagcaccccctaccaaaagaagcatcaagcccagattgtttcaaggggatttctaccaaaccttttaagattaaataatcctgttcttgcttaagcaattccagagactaagaaaataatattgaacctcaaagtgccaaaaaaaaaaagaaactcctaaattcattacttaaagttaatgtaatagcattgattcaaaaacctgacaaagattgtaccaaaaagaaaattatagagcaatctcatgaatattaataaaaagttttaatgatatattagcaaacaatccaacagcactttcaaaaggtaatcgtgactaagttgggtttattataagaatgcaagggtaattcaatactagataatctgttaatattcatcatattcagtgaaaaaaatcttcatctttgcagaaaagacatgatagaattgagcactcacttatgttaaatatactaagtagaaatcaatgaataatccattaacattgtacctctacctaaaagccagcatcttaaatttcaaagcaaaagagactttccagctgaagtcaggaacaagacatgcccactaactcctctgctacttaacaatgtgttgagagttttagccaatgaagttagacaaaataaagacgtgaattggaaaggaagaggtaaaactatttgcagatatgaatatgtatctagaaagcccaaaggaacttgttgaaaaactaaacaataaaagaacgtagtaaagtagctattaaatacaatttacatacaaatatcagtaggcttcaccagacacaagtgcatactttgattccattttggtgaatttcaaaacagatagcatttatgtatggtgtcagaaatcagcaccccctttcagtcactacctgtcttcccaaaggtaagcattatcaaaatcaccatcaattagttttgtctggttttgaattttatatgagtggaaccatacagtatacattatttttcaactggctttaactcagtaggactgaaagagggtacaaagggactgtgtggtgctggtagtgttctgtttcaagatctaggtgctggttacataggtgcattcaccttatgaatatttatcaagctatatatttatgatttgtgcacttttctgtatgcataatcatagctcaataaaaatgttcactaaaagaaatctagtcctatgatctgaaatctcatttataatataaacctaccagtctgaacatctcccttgaattccatactaatatatccaattatctaccccacctttctatatggatgtccaatacaagtctcaattataatgttcaaaatcaaactcctcatattctttttcaaaacagctccttctgtcatctttcccacttgactcaagtgtaatacccattcttcaaattgctaaaactaaaaccccttgagtcatccttgatatctcttattctctcttttgctatatctaatccacgttgatatcctctttgactctcttttttcaatgaatctctcattaattgcattatcataccacatctcataactttcacctttaccaccctagctcaagctgtgacttgtagtaaccttgttttttgataagctttttaaatagaaatccttctacctttaacatcatagagtttgtttagaacatagtattctagtaattatgtcaacaccagccatatcgcatcactctatctcactcagatcaacagatttggtccccacaagctttatgacctaatagtatatgtatctatccctaattcactctgatccaactatgctgtctttatgatgtttttgcaaacatgctatgtacactcctgcttcatgaattttgcatttattcttcccctttcctggaaagctcttattctagaaacccatgtggctcaatccctgacgttcttcaagtctctgctcaaatgtcacctcgctagtgaagtcttatctcacttcagcattttaagtaacacccttattcatcacactttatttatctgctttgcttttccttatatgatctattatcatatgatctactatatattttgcttaatttctttgcttatcacttcacactagacctagaattgaatacctattctatgcgggctattttttttttttttgcatatgctgtttctgtcatatgttcagacttagaccaatatctacaacacaggagatgctgaataaagatggttttgaataaaagtaaacattttataaagaatgtatacaaaaccagaaacatttggaaatatataattttaaaaatgaaataacaaatctaaaccagaactatttagcatatattgctttctagttagtgttggagtaaaatatttgagtttacttttttattatttagtagacagaaaaatcaccagggcccaagcccacaatagctagtgggaaagcaggatagaatagtacttaaaagcacagacttaaatacttgtgattcagagaatcaggcagtttcacttatcaggtaggttaacgtgggcaacttatcagtgggtctcatgattgttatcgaaaatatagagaaaatatagtatttctttcgtggcattattaagagtcttaaacgtaaagcacttaatacattgcttaatgcatggtaagcttaaataatcaattagctactcttagtaccattactgatgatagagaaaattttatatgaaaaagctttcaatgaacttggaagaaatggaaaagagagacttagaataagtgtactacctgcttttctccagggaaataaagaaattaatgaagcaatgccatataatcaagagtcttttttttaagttttatattaagatgacatggatatttagatatcaatttttaaaaaattagacataactaaaaattatacaaattatcatacacgtaatcaaatatttgccagcatagtactgaataagctgacaagacattgttcagtaagaagattttatttagaaattttgaatttgaaaatttattttgtttgctcaatgacttaatgttctttttcctagctcttgttatacaaataaaatagcctaaagtatatatgtatatatatatatgtatgtgtgtgtgtgtgtgtgtgtgtatctatataaattatttgaatgaaacttttaggaagactaataataagttaataaatatgttaataaagatagatgctgctcgtgttagattcagtattttttcttttttttcagttttattaatgtatgggtgaaaagtaaatattgtgtatatttgcagaatacaatgttatcttttgatatatgcatgcattgtgaaattattaccacaattaagctaattaacatattcatcacttcacatactttttttcatggtgagattatttaacactactctcagcaattttcaagtatacatttttttaactataaccaccactctgtacaactccagaacttattcatgcttgtattagatttatattgctgctaaaatatgttac

SEQ ID NO: 94408 - DNA, 12715 bp, Homo sapiens
  misc_feature (1)...(12715): n = A,T,C or G
agaccctccccagacacagtcccactgtatatcctgggggaaggaatggcgatgtcatgaagcctccataaaaacccaggagtactgggttcagagagcttctgcacagctacacttgtggaggctcctggagggtggtccccagggagggtgtggacactccatgaccctttccccatacctcacccaacccgtctcttcatctgtatcctttgcaacatcctttataataaactggtaaatgtgtttttctgagttctgtgaaccactccagcaaattattaataattgaacccaaagaggaagttatgggaatcccaactggaagccagttggtcataagttctagaggcccatactttcgactgctgttgtggggggagtccgtctgggggactgaacccccaacctttgggatccagcactatctccaagtagatggtatcggaactgaatcagaggacacccagtcggtgtccactgcttgctgtatggggaaaaccccccacacctttgtcacagaagccttcttccgtgaggatgactgccgtgatgagaacagaggagaaacacagtcagaggcttccctacacaagggctccatgagccattctgcaatctcagcctggaatgctgcgtcactgggcaaatataccaaaaatactatcctcaggtgacaaacacacacttctgagaactagcaaactcttgggtgcttaaagtggatcaggctatcctaattcagtgaacttctgctctaacagactgactgaacatgggaaaaagatgccatgataccagcaaaacttaccaagaatttcatagtcttcgaggattcacttcaagagggttatgatgcctattttgggagtttaaaaatgggtgtatttttggtataagtgatttttttcatttaacctaaaactctctattaatcaacaagggttaaaaaaaaaaccagtgctgatcaagaggtttgtgttttgcagacatatcacagatctgcacagggtcagaggttccttggatatcttccactttagcaggcaccaaactgttttcctacttctcagtccccctagaagttcataaaaactcatgtttttccacatttgcaacaacacttgatattattacactctttccattttgctttaattattagaaagttaccaggaagctcattaaactataaactacttaaggtgcaatctgtgtctgtgtcctagacccaacaaactttctatatcacagtcatcaataaatgttgaagaggctgaacattaaaatcagtttctgaaaagacacactgttaaccctttcgtaaacagcagatgggaaggcgtgtgttttggcattagcaaaaacaatggagtagcccagcctcttctctaactggaaagaagagaagcctttcatgtgcctcgggagggagacagatttaaaagactcagcagctaaaacgtatctggactctgatccttgaaggccagtgggtcttgaatgaaagaatgcaaaagaaatctctgagctagagagccctactagagaagtgagtcttcagcggaaagaccaatgcctccacgggcagctggtactgggcgagggcagagggcaggctggctggagccaggggcgacctcgggggcagccccagagatgggaaaagactctacccggccgcctccttctctcagtccctatcaagcagcgccagaaggcggcagcaagcactggcctggaaagctgggttttaatcccagctccgctcctaattctggggtttaatcccagctccgctcctaattctggggtttaatcccagctccgctcctaattctggggtttaatcccagctccgctcctaattctggggtttaatcccagctccgctcctaattctggggtttaatcccagctccgctcctaattctggggtttaatcccagctccgctcctaattctgggttttaatcccagctccgctcctaattctggggtttaatcccagctccgctcctaatttgccatactattcaagtcactcttcctatctggcctcagctgagctaaacttcaaaaatcgcatccactcgtacgttctgaaaaagctgtgctggcaggtgaagtgtaagctcacttggattccctgttgtcccctcaaactctacagtactcatgaggaatcccctaaaccagctttccccagccacccagccttgatcttgaaactactgctgactcctctcctctctggtctcccacacacatcagtccctaagccgcatcacaccttttctcaaagaaagaccctgacaaccccccacaccaccagcacagctgaagtgcttattaaagcagattccagggccgcccccagacctcggtccaggtctgtgtttaacaagcacctcagatctactgcccggtggacttgtcctctgggtccaacaagccagccctcaccttccactcccacactccctccccatgaagtccaaatctccagcaacagcacttcctgagactctctgcctttggtcttcccccagatttatcctgtatttggccgccacactcttttttttttcttatgtccccgagaaaactgcagaagtttttaatgcatttatcatgcattctacagataagtttttaatgcatttatcatgcattctacaggtaactttccccaggaaaattcagccatcagttttgtccatgttgttaatatatacgacacccatatgttatagcatagagtcacagagggttcatattcaagctcttccgttgattatttaggtgaccatagtcaatttacttaatctctctaaatttcgttttattgttatttcaatggttttttgggcaacagctggtatttggtcacatggataagttcttcagtggtgacttctgagattttggtgtacccgtcacccaagcagtggacattgtacccgatgtgtagtcttttatccctcaccccagagtccattatatcatttttatgcctttgcgtcctcatagcttagctccccagactcatctttttaataatgaaaataaaaatagcaggctggcgtggtggctcacgcctgtaatcccagcactttgggaggctgagacgagtggatcttctgaggtcaggagtctgagactagcccggccaacatggcgaaaccctgtctctactaaaaatacaaaaattatccgggcgtggtggtgcatgcctataatcccagctacttgggaggctgaggcatgagaatcgcttgaacctgggaggcagatgttgcagtgagccaagattgcgccactgcactccagcctgggcaacagagcgaggctctgtctcaaaaaaaaatagaaaagaaaaacagctatgtttattgactgcttactaatataccaggcatacatactagaacctaatctcaattctttcataaccctgtgaggcatcagtgttatcctcattttaaagatgagaaaattggggcttagaaaagtcaagtatctcttctgggtctttgttggcaggaaaaaaagagaatttttttcaattaaaaaaacaaagtcaagtaaattgcccaaggtcatataataagctacagtcaggactcaacccaaggctcttctgcccctaaagcccactcaggcaggggcagcctgtcccgcgcacatggcctgctgtgtcagacgccttcgacaactgcccgacattcatcacagtcagggctcaccagaggatgagccctacactccttccactgcaggaacaaaagtccagccaaactttacaacggtcctgaaatacacaatcagcatttcttctccccttcacgctgctctcgttaccccatttggagtcccttctctacaactttgtttgcaacccctcctctccggtgaagccttcttgattactccacactgcaagtttctccctcctctgggttcagtgactgatagcatcactggtacttcctgcgtgccacgcatcactgtcacctcttgtgaagataatgtcctcccaactagaccgcaaactcctacagagccaggtcacagtgaagacatcttaatgttcctagatgtggcacacgcctagcacacagcacttaattattgagattatattggattttagaaaagtttttgtttgtttcttgttttcagaggcacaggccatgtatcacctctttctcagaaatcccctaatcgctgacccacatagcacacaggcattggtgctcaccttccaggggagccctcagccttagctcccctatcctaactgggcaacagaaacagctcaaggtccaagaaagcattaaagagacttcaggcaagtggcaaaatgacaggagtgagagagctgggtgtgctgtggggtccaggcctcgcctctaacacagagccccgagggtggctgaggcctcttgcagtcttcagcaccaccgtggagggagagcgctgggctgcagcacaggcgtcggtctggctggttaccggatccttccactgcaaggatccacagtgtgaggaagcttcctttgtgctgtgacccgcactcacctgaacacatcattccaatactcctttacgtaggacacttgatggaaagggatgtctaagatctggcaaactctgtaagcatcttcacagtctttgtcggcagtacagaccccatgttcatccagtgagtcccagttcttcataaacacccctgtcacctggtaacctgcgggcgggaaggtcaattaaagagaatacataaatcaaccttcggtaaaacggcagtgatttctgagctctgagaagttccccacacgctgtgctcctgtgcctctgtgcctggcctgccgggcagtccctgctttgccatgtggcttcagggatccggtttccatcttggtgcctgagtccccaagattaacgaggtggtattttctcatctttgtgtccccatctatgtatcagcacaatacctagcaggaggggatcagccagtgtgtgtggaatacacgaaggaatagtcgaaactcaacaaaatttttcaaagcaccattcagttatcaaaaaaggaaactcttttcaaaagttatttctagttactatctaagacttagattctaagtgatcagatataaagataattaaaattttcgatattttgtaagagctgtaccacctagtttatgacctattttctaccttttcgattgtaacaaaatattcacccaaatattggaaaggccaactttagccctacaccaccttagcaaactacacaggtgcmgaccctgtatgagaaagctggttcgtttaggtaggctgaatgtaatgaaagacagggcaaatgactgctgaagaaggcttcatatagtacccaaaacaacagaaatttgatgacaaagctttgtcaaaactacaccaccacacgcgaaagaccacccctatcccagatcaaccagactaatgtctacctaacagtctaaagcccctggtatagcatcttccataatcagggctaaacgtgctccaggctcctctccttccatctccatctggccagaaccagcccacacttgcaggcctctgtgattctgcttgcactgctgactgtgccgggagggccgcctccacctccaagtctctgcttagtgacatcctactcttctttcgactcagctgagcacctccatctctaggatgctttcctccactctcccttcctcacaactatttctgcttatggtccgcctacccttctctttggcacttactgtacctaccataatagctatggttattaacaatataaactaatagccactactgttttctgcgtacctcgtatgtgctgagcacgtactcatcagtatgtactatgtcatctaatccctccagtcaccccgtgaggcaggtgttagccgaattttacaggggacggcttaattcacttgcccaaggtcaggagccaaagatggcgcaaagcmgagctccacaaacgtgactctgtgaatgaggcctcccgcggggagccacacaggtgaagttaaacaagtgctcatttcagcgccgggcccgaggaatgctaagcacccgtggggctccgtttagatgccggaagaaatgcaaatgctcctggagaaaactttgtcctccagcgagcggagaacacaggagacgctgaacaagcagacccgccgcgcggcagttgtccagtctgctgagtggggaggacaaggacctcccaccgggcggccacagcgtgtgcagaggtcaggcccccggcccggcgatcccagctcccctcaccagtgtccacggtctcacaggtgaatgtggacgccgcagatccgtgagaaacccttccctccccaccccaccccggcccgccggcttctcactgtgggtgggcgcgcgtgggtggagaggggcgcggaactgctcccaggtagtcggagctgcagtcgcgcacacctccgactacacaggtggagggcgaggagcctccgaaccaaagtcagaggacggggtatcctcctgccgacccgcgcgcaaccagcggcccagggagggaggagacgtgcacaacgccacgacggacggggacaggtttycggggacacattcgctcggsggggggcgggagcctcggacgcctcacctctccgmctcagcagcagcgcggccacggcgctgtccacgccgccggacagggngcacacgacgtgccgcaaggcctgcatccgccagtcgcccaacttcgccagctgcagctaccgccgcttccgcgccttgccggaagtcccgccccggccgtagggtccgcgctagtggcccggccggaagctgcggcagcttacccgcgttccgtccggccttcccctgtcccgcggcgggttcccctgtctccggcctgcgctcacccctgaggctccaccgacccgcggggcgccgagactctgtcgggccgcgaggggctggctttttttttgagccgccgccttgccctccccacccgcgccccggcctcactgctcttcttctgcgctgtaaaccaaaaataaaattctaagccccccagccagccattggaggcctcctctcggccaagggcgtcctagagggaacctgaaccgcgagttcgggctctgatgggaaaggccgggtgggacccgcctcactagaccctcctcctccctttggaattcggaccagcattaacgtcaaaacagacttaagactgtctaggcggactctccgtagcaataggataccgacatgacagatggcaggccctgaaagatatcgaagtattttacagtattttaatttaatttaatttttaattaattaaatttttttgagatggagttttgctctgtcgcaggctggagtgtagtgggcgcgacctcggctcactgcaaccttcacctccaagattcaagcgattctcctgcctcagcctccctagtagctgcgattacaggcgcccgccaccaagcccagctaatttttgtatttttagtagagacggggtttcaccgtatttgccaggctggtctctcactcctgacctcaagggatccgcccacctcagcctcccaaagtggcgggattacaggtgtgagtcactgcccccggcccagaaaatctttgaatccacctatgacctggaagccccaccccaccttcgagttgtcccacctttccggaaccaatgttacatcttacatgtattgatttatggcttatgtctccctaaaacgtacgaaaccaaaagctgtagcaccaccagtttgagcacgtgttctcaggatctcctgggactatgacatgaataaatatcttcaaatcttttacagtttgactccaagcatactcagcactcaatccttaatgtctgtgaggtgtgttggacaggggttttgtgttctgtccactcctactccatgcccagaaaagcccctggcccagggcaggtgcttcataacctcgctgaataaaggaaggaggagagaatggaggtcatcccccaggggtgatattcaagctgagttcttctctacgagttagcatctagacaaggtctacctaaagcacagggagactctgaacgaaaaagatgttcatttgtgaatagggcattgcaatgggaatatgcatgccacaataagctatgtgggtattcagggaagtaaaggaagacaaaggtttttattttatttatttatttttttgagacagtctcacttggtcactaggctggagtgcagtggcgtgatcttagctcactgcaacctccgcctcccgggtttaagcgattctcctgcctcagcctccggagtagctgggattacaggcacatgccaccacacccagctaatttttgtatttttagtagagacggcatttcaccatgttggccaggatggtcttgatctcctgaccttgtgatccgcccgcctcggcctcccaaagtgctgggattacacgcgtgagccacagtgcccggcctaggaagacaaaggtttttaaagggaaaatgaggatcacatcattgttttgagataattctttggctacaaagatcaataacaagggtgacagcactccagggttggacaagcagttgctgggcagatgtccttgcaacagaagttttttgttttttttttttttttgaggaaggttacgatagcctttgtgtaaagttgtggtttttgcagtcttttgtgatagttgttattattaggcacatgtgcatgagaaccctcccttgtggtatgaacccaaagtacctgagacaggtttcaatttagaaagtttattttgccaaggttaaggacatgccagtgacacagcctcaggatgatgtcctgaggatatgtgcccaaggtggtcgaggcacagcttgctttgatacatattagggagacacaggacatcaattaatacgtgtaagatgtacactggttctgtctggaaaggcgcaacaactgggggtggtgggcagctcgcaggtcataggtagataagagataaactgttgcattcctttgggtctttgatcagcctttcactgaatacacaatctccatgtgagaggcaggtagaggaacagtcactgatgccttagtctggctcagtgaatctgcattttcacataaacaatagggcagaggaagcaatcagacatgcatttgtctcaggtgagcagaggactgatggtgagttgtccattgtctggcatctgtgaagataagctatcaatttacattgccagggtgaaattcaacagaactattttagggtaaagatctcgaggtccacgaggaatttccaagaagaaaagcaggaactaccaacaggagagccctggggactggtgccaggaggagctgcaagacaggagggaggtcacagggcctgtggggaaaaggatgaccactttttcagaataaaggatcaggaaaatacccaacaggagggcaatttcatcttgcatttcccggaagagataaggaaatccagtatctgggcagctgagtttgtgcagatttagaggtacacgtttaggctgtgtctaaacttgagtctgggtctgggggcaggccctccttgggtgtggcaggctgatctaaggttatggcaggttaagtcccagttgcagccaacccgcaaaatggctgagatccatgctcacatattttctgctactttttggttaactatatggtattttaggtactccgtagctccaagaggcccctgtgtatcacccaggtccactacaggctagttatggccaggatgacgacatcccaggtgccgcctgccaacagcaatgtcagagacgtggatttcagagatgtaaaatgggaagacatttgctccacaaaattaatgaaatgtggtaaaaaatcacatgaagttggacgtcttggacctgggagggtggccctccagtggcagctgaggtgttcggtgccatcctatggagaaaggggctggccctcctggggccacggagcccttcagtctccaactaactgtgcatcttcccacccggagccctctgaggggtgaaccaagggcctgtgtaccaggagagggagtgggggagctcagactgggtggcttcggcaggaagagcccagtggagaaacccagacagaaaggaatgggcctggagcctcaggacaggagcagctctgctctgtccagctcctgctcctgggccctcttcctgtctgtctgtagagagttaaagtcagatcactctgtctggcctgggtaccaaggagagcctggctgcactgaagccgcaccggggaggggaagggcacagsggggaggagccccagcagcgggattggggccacaggccaaaggctgggctcacccccagggcctgaatggagacaactgaggcacagcttggttacagatgagctgggagctgaacatctccctcctctacccagtgggaagccctaagagggaaggggtacctgagcgctgcaccccgctgcacccagcagaaaacagcctgacccatagcagagcctcagtaaatatttgctgcatggtttaatccaatttcagatttccttttctacccctgggaaatgagggccagaccagaggttccctgaggaccctccggtgtcactaccaggcccctgggattccctgctgtcccggagacgtggagccgccgtgattcccacgggcccggcgactctggccagcgcaggactggctgaaagtcttacctggggagtcactgctcatggagcggggcttctctggcttcatgactcacacatccaagcagctctgcctgtggggagcttccgtctgcaggcgcagcaactcagccgtgagaagcgcgccacctttccaccatggcagtttccaccgagacgtctttccacggcatcgcctgtccaccctacccctccctgctctcgacggcagaggactcgctgttccgagtggcagctttagaatcacgcagtaaccgcaggaagtagagagcacagcacagtcatcattttccctcatctttgtggacagaggcagatcctggtatgacccagggagcactggagtggggtccgaaatacagagtccggccgctggctcgctgctgtctgccatgaagccgctcaaccaaggtggtaagtttcctcaagagaaatggacacaaagtagcggcttcctggagctcgttttctaaataaagggaatgggctttccagtggcactcagttcctgccactgcccactgagcttgtcgggcccctgctgagagcaaagctgaggggtcctccccgaggcctgcccagcagacgccgtccatcaccttagtgtccaggtaagcccggcctcctcgcccatcctctttccactcataccctcgtctccccagagcagcttcttctcaaggggtgtgtctcaggccatcgagtcagcatcacctgtgtgcctagtaacaattactaggctggccccagacctagaaactagtgtatctgggggcgggcctgggcctgcactgacatcaatttttattgactaatttttgaaaatcacttgtatgaaagcattcgagtctagatagtagccttactgattagagtgataaaaatagctatgcatgtttgaaaatcaagataagcttaaaaatcaagatatgcttcaataagtccatttattttacaatttaatgtaaatctagaatatctaactatttatacaaacttaactttaaaaatagccacttgctattttacatacaaaacattcaaaagaaaattcttcatttagagtgactgaggcttcacattccagcccagagaatggcagcgaggagggtggcggcgggaagcagaggccttgggtggtccgtgctggccccagtccctcagcccaccctctccagcactgggaatatatttatgcttatttttctttttcaaataaaacttctactaaaacatgtttctttttttttttttccaagacaggttctcacattggtgcccaggctggagtgcagtggcacaatcacagcccactgcagcctgcatctccttgagctcaggccatcctcccacttcagcctcccaagtagctgggactacaggcatgcactaccacacccggctaatttttgtattttttgtagggacaggagtttcactatatttcccaggctggtcccgaactcctgggctcaagtaatccgcccacctcagcctcccaagttctagggttacaagtgtaagccactgcgaccagcctaaagcttgtttctgagggttgaaaaccactttagggctgttctttcaaggcaaaggatttggttcggcttagaacttgaggagtggggaatccacgttctccttgtcagcctcagggctcagctggatcagaggggagctcaggtctatgagctggaagagagcagagtggaggaggtgagcgtggatccggctagggcctcccttcccctccctgcacagaggactggctgcgtgggtcatcacagccactcgctcatcctggctcgggtgcactgaaaagcactctgggccaccacgtctaagaagctggaaggagacaggacacacacggagaagcccaggcccccaccatgcacattcctctgtcccacatctggccctgg

SEQ ID NO: 94409 - DNA, 20012 bp, Homo sapiens
gctggaggcacaggccatttactgttctgtgccctggggggctcaaggcacagagctcctcattagccaaagtcacccaagttccccaacctcttaaagatttcctcatcatcatgcaagaagaagagaaaagtgagtgtccatagaagctttggggctcttcctctaatcaggagaaagctggtgtgtattcttcgcttctttctttgctttttaaagatccaactgctttaattttcatcttttattatgggaaaatataccacgtataaatattaaaaattataaatatatattagtgcatatagaatggccagtataaacatttacagtttccactctttttcagtttacagtttaatgacattaagtatgttcacattgtttagcaaccatcaccgccatcatctccggaacagttttatttttcaaaatggaaattgcaaccattcgccaagctctccactcctctctctcgcctacccctgggggccacctttctagtttgcaactctaggagtctaactactctagacacttgatagataagtggaatcataccgtgtttaatttttttttttagaggtagaatctttctctgtcacccaggctggagtgcagtggcgtgatctcggctcactgcaacttccacttcgggggctcaagcaattcttatgtctcagtctcccgagtagctgggattacaggcgtgcgctatcatgcccagctaatttttgtatttttaatagagacgagctttcaccatattggccaggctggtctcgaactcctgagcttaagggatccacctgtctcagcctcccaaaatgctggggttacaggtgtgagccactgagcctgggcatgtttatccttttgggatttatttatttcactgacgataatgtcttcaaggttcatccatgttgcggcctgcatcagaagtgcctgtttgtttttgttgtttttttttgtttggttttattttgttttgttttgcgttttcatggagtcttactctgtcgcaccggctggagtgcagtggcacaatctgggctcactacaacctccgcctcccgggttcgagcgattcttgtgcctcagcttcctgagtagctgagattagaggtgcatgccaccacaccagctaatttttgtatttttagtagagatggggtttgccatgttggccaagctggtcttgaactcgtgagctcaggtgatccacacgcctcaacttcccaaagtgttaggattacagacgttagccactgtgcccagcccaaggatgtgtatattttctatagagttttgatgataatactttgacagcaaatatattgtgactatatatatatagtcacaggtgcccaggccggagtgcagtggcgtgatctcggctcgctacaaccaccacctcctagcagcctgccttggccttccaaagtgctgagattgcagcctctgcccagccgccaccccgtctgggaagtgaggagcgtctctgcctggccgcccatcgtctgggatgtgaggagcccctccgcccagcagccgccccgtctgagaagtgaggagcccctcagcccggcagccaccccatctgagaagtgaggagcccctccacctggcagccaccccgtctgggaggtgaggagcgtctccacccggcagccaccccgtccgggagggaggtggggggtcagcccccgccagccagccaccccgtccgggaggtggggggcgcctctgcccggctgccccttctgggaagtgaggagcccttctgcccggccaccacgccgtctgggaggtgtacccaacagctcattgagaatgggccatgatgacaatggcggttttgtggaatagaaaagggggaaaggtggggaaaagattgagaaatcggatggttgctgtgtctgtgtagaaagaagtagacatgagagacttttcattttgttctgtactaagaaaaattcttctgccttgggacgctgttgatctatgaccttacccccaaccctgtgctctctgaaacatgtgctgtgtccactcagggttaaatggattaagggcggtgcaagatgtgcttttttaaacagatgcttgaaggcagcatgctccttaagagtcatcaccactccctaatctcaagtacccagggacacaaacactgcggaaggccgcagagtcctctgcctaggaaaaccagagacctttgttcacttgtttatctgctgaccctccctccactattgtcctatgaccctgccaaatccccctctgtgagaaacacccaagaatgatcaataaaaaaaaaaaaaaaaaaaaaagacagcggtgtgcagctggaatgatgcacctgaagccaaggaatgccgcacattgccagccaccacccaaaactggaaaaggccaggaaggattcttccctagaaccttcaaaggcagcacagccctgccaacacctgcattcagactctggcctccagaactgtgagaggatgaatttstgtggttttcagccaccccagcttaggaaatgggttgcagcagactgggaataagagaggcagccagtcagcctccgtggaattcccaggcagcttgcaggagccacagtgggccctgggctctgagaaggtctgaggcccagcaggcgcaggggcctaaactatttctcagcaaggaggaaggaaggttcatccagaacgtagatccccttcctccttctcacacctcacaaggtcacagcgaggtggttgggaggacagccagggacttttcactgaggtgtgtgggagacagcttggccacccttggcctctgaagggaggaggtggcatgaaggagggcagtttcggaacttcccagttcctgcttgatgacctgtgtgtaaagtattcctgtttaggtttcaaaatcctctcagaaacataattctcagaaattccaggcacccaatccagctccctggccttccctgaaatctgaagtcaaaagggctgagccagcctgccctgggtgtcaggcctctgagctcaagctaagccatcatatcccctgtgacctgcacgtacacatccagatggccggttcctgccttaactgatgacattccaccacaaaagaagtgaaaatggcctgttcctgccttaactgatgacattgtcttgtgaaattccttctcctggctcatcctggctcaaaacctcccccactgagtaccttgtgacccccattctgcccgccagagaacaacccccctttaactgtaattttcctttacctacccaaatcctataaaatggccctacccctatctcccttctctgactctcttttcactcagcctgcctgcacccatgtgaaataaacagctttattgctcacacaaagcctgtttggtggtatcttcacacggacgcgcatgaaactggagtcctcacgcccaccagcccagagtgctctctagaggaaggctacagacacctcctggctcactcatccagacgttagctgtcttgctgaaactccttttttcacccttgaaaaccactggaagaatgaccaagaacccagctatcctgagtaagttcacttaaagaagcaaaatctaacatgagtggcaaaacggacattggcaccaggagtgtgggtcagagtcctgccccttggaactacatcatcacttgtacagtgtaccccccaggcaccaagagaccaggctgagactcttcagttgccctgggcctctggtcagtgtcttccagcctggcacacaggcaggccctcataaaacaatgagtgctgaaagttccagccttcttggtgggttctcagcaccccgtcgtgagccacaccctrccccagggaaatcagggtcrccctgctgctacccctaggccagtgccccttctgaagtgccccaggctggcacccctatacttagatctcttcaacctcctcatgaaaaccttcttgcccatcaccccagcattccccggactgtgctaaatgagcagctgaccacacgtcaaatcaattttcagagtttgcctttggtttaatattcatggcttatccaaaagatcttgtcaccatagctagatgaaaaaaatgacaaggctctggagaagcagaaccacaagatggaggatacctgggtcccaggttcatgaggagaggagctgcctgctccacagactggcacgtgagtgggaatgaaacttttgctgcgtttagaccattacctttcttcactctgtcacatagtctacccacgctaaacagaacttgacctccaccagaccgtttacatcaagacctgtatgtgcagtgcagtggcctgagcctccaatccatgccccacctatcaaactggccttgccatattcctactctgagagtggtattctggggacagaagctcagtgcatagaattgatgaatgcgagatccttcaggcgctttgcactttgaagtctatccatcctagcacattccaagtacaaagaagacacttcagcagtacaacctggcctacactcagttcaattccttcttcaaaaacctaggcccggccaggtgtggtggctcacatgtgtaatcccaacaatttgggaggctgaggtgggtggatcacctgaggtcaggagttcgagaccagcctggccaacatgatgaaatcccgtctcttctaaaaatacaaaaattagctgggctttgtggtgggtgcctcaaatccctgctactccggacgctgaggcaggagaatcacttgaacccgggaggcgaggttgcagtgagctgagactgcaccaaggccctccagcctgggcgacagagtgagacactgtctcaaaaaataaagaaagaaataaaaataaattgaggaaggattgagcatgcaaaatagaatcagcctttgaccctgaataccctgcagtgagaattcccctgtggttctcaggcttctgtaattccagcaaatacactcttccttcaggttcactaaaatgcagatattgtgagataatgctcatttctcacagcttgcttgaataataataatgatcattatagtaatttacaacttaatagtcaacactgcctttttaacccagtctgtgagactgaatcgtaaacgtgacattctttgaagctctcaattaatataccagactgcataaactctaataacttacctttccatggaaagagaatatgtgggtattctctttgaagacaaatggtggagagtagactctcatcaaagaccctctggcagtaatgagttgcattcgggaaggttccagaaggttctgtggaaggctgcagtttgggattggttctcaggtgtctgtctaactgctttctaaggatgaagactcctggttcgtgctttagctacacccacaggagcaacagactaagacattcctccacaccataacagacccaggcagtgcagagccatgtgggtcttatctgtcttgctgtccacagtctggttttatcttagacccagcctggtgcaattcatgttgtgtattggcactccacttaagtttcctgtttgtaaaaagcccctttcatttggtgattcctagggctttaggggaactttctggaaacgtggaagaaggaaataaaggttgttttgctgaggatgggttacattgggcgtgggacccaaatgagtggtttgagcaaaaagtagcctccacgctggactaatgcttggcaacattatgggaaaatttggggaagctgggagaggagggggcagagtttctttcccagccagccagggggtccaggcaattttggtcctagaacatctctctgtgcattcccaagtaattgcaaggcttcttcttgtcatcgtctgagacttggattccccaagcatccttcttttcctggagcctctgagtcctctattcctgaggcctttcttcagccctcccaatagccctgccatgatttcattgcagggctgtgaccgtctatgacaagccagcatctttctttcaagagacctctggacctgcagcaccaactcttcatgaagctgggcggcacgcactctccgttcagggcctggtaggcctcccatcctcagctgccttctctcctgcttgccaatgccctgtcctctccccttctcactgcagacctgggaacccactcatccaggggttggcaaactaaggctacaggccagtctcctgcttttgtaaatcaagttccattggaacacaacacactcattaacttctgagttgtctacagctgcctttgagctacaacagcagaatcgtgttttgcaacagagaacctgtggcccgcaaagcctgaagtatttactctctggccctttaagaaatgtttgtggacccctgcgctgtcttactctcctgccagtgggttcccaggcctgtggcaggatctgtggacctgtgtgtcccctggggtgtctcacggggctaaggaggggaccttagtgcaggtccacacaccctgaggtgtgcccctgggtaagctggagtggtgtgggagggtgtccctgcaccctcatcttgagtccaggggatgataagacagtaagtcgcgtggagaaaaggaatgagtcagtcttgtttgctgttgtaaccttagcacccagcaacaatattagagaaagcaagcccaggcctcagatggcaggggtggcctggtgctgctgatgtggcygggcaccccaacctttgggagcctgcaggccttgccatggcaggagatgcccgtcctgggtcccgggcctgctctgtggcctctcacaggcttttttcctgctctttcatctcagaacctgaggacccagacacggagcggtcggccttcatggagcgggatgctgggagcgggctggtgatgcgcctccgygagcggccagccctgctggtcagcagcacaggctggacaggtctgcacgacccctagaacacytgggcttggtgtgacgggcacctggccaacctgtgttctcctcacccctgccagtcctgcatgcccccaccccgccacagtctcaatgagaaggggagggcgtgtgagctggaagaggggtgtctagaaacaggcccctgacattcaattctcttctcatagaggacgaagacttctccatctgctggcagctttagaaagtaggtgtgtagctgcggtgaggatctatgggcttgtcgggggccgctgagctgtgagctgcttgcctggcctgcagcgtgttgctgtcccgggccactgggtggggcagcctggggacagcgggggtggtggaggtgggccgccctgaatccccagttgggtcattcagtgaccaggccctcaggctgaaatgccccctccaggagagtatctcacagaggctggtggcctccccaccagagcagtgctctttctccacctgaacaggtgactctggctattgtttatttaaaactttttttctgaatgggcacggtggctcacacctgtaatcctagaactctgggaggccaaggcaggcagatcacctgaggtcaggagttcgaggccaacatggcaaaacctgtctctactaaaaatacaaaaattagctgggtatggtggtgggcgcctgtaatcccagctacttgggaggctgatgcacgagaattacttgaacccgggaggcagaggttgcagtgatctgagatcacgccattgcattccagcctgggtgacagagcaagagtctgtcaggaaaaaaaaaaaagaaattctatcagaaattccatgtagaattgtttctttttttaaacacagagtttgaacaactgactcttgatggacacaaccttccttctctcgtctgtgtgataacaggtaccgcctaggaccctgggtgtctgattggttgggggatggcggagggggaggggcacgcagcctttaccctgtgcttcccacgatcttgtctccttaatcttcactgcagctctctgccatagggtcttatactgcttgacatgggggaaactgaggctcagaggatttcacagcagggcagggagcccagatttgaatctgtagataccaaactttctactttttcagtagtttccaagcatcttttttttgttgttgttacatcattggtgtcttttttcttttttttttttgagacagagtctctgtcgcccaggctggggtgcactggtgtgatctgggctcactgcaacctccgcctctcacattcaagcaattctcatgccttagcctcccgagtagctgggactacaggggcccaccacacccagctaatttttgtatttttagtacaaacagggtttcatcatgttggccaggctggtcttgaactcctgacctcaggtgatccacccaccttggcctcccaatatgctcgaattataggcacgaaccactgtgcctggccatgtcattggtgccttaaccaagcctcttttaatttttcaaacggaagaacccctgtcccacagttactgctgctgagccctttcaaggtgactctgaggacggagaaaagcggaagtggtgtgggaagaggcggggtctgggccagctgctggtcctgctctcctccctcctctggccactaggctcccaggagtggtttggagcccacgccatgtgctctgggggctgtggcagggcaggggcggtttggaacctgcgccatgtgctctgggggctgtggcagggcagggggagtcctcgtgtcccctgtgcacaacacagacagaaggctgggtccacccagtgggcggtcgactgccaggccagtgcttaccccgccatgtttgcagcccgaggccagctggctgcaaatgcagggctgtgcgtcaggggtcagagtgcacacacccctgcaggtctaggggctcctgckttgcttctggaagggcctggatgggacctgactggagmggccgaggggtggagcttctgggaaagggatccctcctcggggggagtgtcttgggcctgrggccaattggcagggacagagacgagtccatggcagtatctgctcttctctgtgaaggcaaagggcctccgagggagtattacagccgcctcatccaccagaagcatttccagcacatccaggtcwgcaccccytggctggaggccgaggactacccccgcttctaggtgagaggccagcaggaggctcagggaggaggcggggccttaagcagsgggaacaggggtgggcgggatgtactttttctgaaaakgtggctctggaggccacttggggacaggacctgggctctggctgaactcccgggaggaggctacttcctggtgtgccagcccctccctgccaggtggccccagaggccctttaccaaggggtttgaggaggccacgtcctttcagccttccgcgccctccattcagtcctcttccttcctgcaggagggctgggcctggggttggggccactgttgcccaggtgtgggagggcagtggctttgggaggtacagggacgatgtgtgaaacagcgtcgcctctcccagtgagatggttctcctttgcctccgtctctttccccgytgayttctccaagtggggagtcgtggcttggtcctgatgcgtctctagagccacatcttccagcttcgagtgagcagarcagttggagkctgagggccttttcctggcaggaytctccagttagtctttgttttagacagtctcgctccgttgcctaggctggagtgcacgatctcagttcatgcaacctccgcctcctgggttcaagcgattctcccacctcagcctcccragtagattacrggattacaggagcccgccacaacacctggyttatttttgtatttttagyagaaacagggtttcaccgtgttggccaggctggtcttgaactcctgacttcaagtgatcctcctgccttggcctccctaagtgctgggattccaggcgtgacccatcacgcctrgccccagctagtctttagaaatgttaagctgtttcactttattttcacactgacagctggtttgtagtgggtgtgctgtggttttttattattattattattattattattattattattttgagacagagtttcgctcttgtagcccaggctggggtgcaatggcacgatcttggctcactgcaacctccgccttcccaggttcaagcaattctcctgcctcagcctcctgagtagctgggattacaggcacctgccacgatgcttcgctaattttgtattttttttagtagagatggggtttcaccatgttggccaggctggtcttgaactcctgacctcaggtgttccacccaccttggcctcacaaaatgctgggcttacatgcgggaggtgaacctgggaggtggaggttgcagtgagctgagattgtgccactgcactccagcctgggtgacggagtgagactctgtctcaaaacaaaacaaaacaacaacaaaaaaaccaaattgtggttacgtagaaaaagtgtcaacttacattttcagatgtcccagccaggccatgtggctgcttggccagcttaagccacttgtgcttggggctgtcgggggacttatccgattttcactcccctcgggggatgttgcctcactgtgctgggaggatttgtgttcccagggcagagaccagcgctctgaccgcacccctcttgcccagcagggtcggtggatctgggtgtctgtctgcacacgtcctgcagtggcctggacctgcccatgaaggtggtggacatgttcgggtgctgtttgcctgtgtgtgccgtgaacttcaagtggcaggagcagaacccgaatctttctggggatagcttcacagatccaccgctgaggaggaaacagtgcagagcgagctgcccacagtgaggccctgctcctgggtcagtccagcacacactggaggccacgaggaggagccctgcggttactgtgtctgggctgagcctcactgaagtagttgcttccatttagagctcatgttatatttaggttgatacaaaagtaatcacggtttttgccattaaagatggcaattacttttgcaccaacctaatatgaaaaaaaagcatcttaaatactggaactccactcggggcttttgctcctagagtagaattggcgggaattgcctgcaggcttacatggttttctttgtttctttctctcccaccatgtcctgtttggccaagctcacgtgctgggtttgaatgagttaaatgagtgtcgtgctgtggcctcactgcacccagcgtagacgggcatttggaagggcggtgttagaggagattctagaagcagtagccccagcacaagctgagcccttggcccctgctcaggagccggctcctggatgggagtcagggatgtgagcccctcgtgtgagctgagctcagggaatgtcgggatcaaacctggtgccctagaaaagtcatcttttatgtgctgagccagtccccagggtgttgcctttacttgttccatggccatggaattaagcaaaacatgcaaaaataattcttcagtccttgaagagcatccagcacagaaggtagaaaccctccttaaggctccctcctcaaatcggtttggccatttcgatgtgcacccccccaggcctttatacccttcagatgccaaatctaagaaccagctcccagaaaccacaccccctgttccaacccccagcctggcttgagcatgggttgttggggggagcccaggtgggcaccccaggggtctggtgtcttctccaggsagctctcaggctcccttggttctctctgcagtttacatgagctggtgaaacatgaagaaaatggcctggtctttgaggactcagaggaactggcagctcagctgcaggtagccacatctgccaccacgccagggtggggagggttctggaggctggcaccgagccacgctccctgatccctgcttcccacagccagggtgggaccatgtggggtctggcggaaaagctagggagggagcagaggtcacagagtccggcccactctgctgtcccgtttcggtacagtaagctcgggaaagttaggacacacccccacctgccctctggatttatggagctgacattccacaaatgatgctggagccgggtgggccgggctgcagtttaggaagtgatcagggtcaggtaggtgcgtgggcaaagggagcttctgggaccagccttgaaagatgggtggaattctgcaaaggttacttgtttcttattgctaaaagtaatacatcattcttgccaacagaatgattggcaggattttcagtaaaggtccaggtcagaagtcatttagactgggtcccccagtctctgtcagaaccatggtactctgttgtggtgtgaaagtagccacagatcatctgtcgattaaggggtgtggctttgttcgaataaaactttatttacaaacacaggctgtgggctggatttggcctgcaggctgtagtttgtgatccttgattcagacagtttagcaaggctgaaaagaacaccgacacccccttgttacccacagatgggtgggacttggccggaggccaagaggagggtgctcgcaggggaacatacagcatgtagaggccaggaggtgctccagggcaccaagtgtgggaaagtgggacatacggggaagtttccagaaagcatgatgtcaagttggaggcagagcgctgctggggcatgaagagtctcgagtccaagtgagggagttaggaacttgggaggggttgttgttgggtaggggacctggggtcagccaggtggtgacatgggatggggtggggacaggcaatgaggtaagctctgctctttatttttttgcaggtgcttttctcaaactttcctgatcctgcgggcaagctaaaccagttccggaagaacctgcgggartcgcagcagctccgatgggattagagctgggtgcagactgtgctccctttggttatggacacataactcctgggccagaggctaaaaccccgggacccctgctgtccttcccacagcttcttctcagagtctcagggcaaatcctttcgagcagcgcctcccagtggccagaagctgaaatgatggcagtagtgccacctggtgaatgaattggttctgtgacccgggaagctgtgcttggctctgatttcttttctggaggctcggaaacacttcctctcttcttctgttcttcacgccccatgcycctgctagcgtattactgttctgtgacttccctgtracctctgcagtactcctcatcctgcgtttggtctccaggtgtcacctttctgccgtgttcctaacattttgattcctgtcttgaaaaaagcacctgctgcaccataagcccagggatgtggcagctgcagcgggcttggctttgtgaagaaccgagtgtgtccagggatgtggcagctgcagcgggcttggctttgtgaagaaccgagtgtgtccagggatgtggcagctgcagtgggcttggctttgtgaggaatcgagtgtgtccaccgatgtggcagctgcagcgggcttggctttgtgaagaaccgagtgtgtccaccgatgtgacagctgcagcgggcttggctttgtgaagaaccgagtgtgtccaccgatgtggcagctgcagcgggcttggctttgtgaggaaccgagtgtgtccagggatgtggcagctgcagcgggcttggctttgtgaggaaccgagtgtgtccagggatgtggcagctgcagcgggcttggctttgtgaagaaccgagtgtgtccagggatgtggcagctgcagcgggcttggctttgtgaagaaccgagtgtgtccagggatgtggcagctgcagtgggcttggctttgtgaggaatcgagtgtgtccaccgatgtggcagctgcagcgggcttggctttgtgaagaaccgagtgtgtccaccgatgtggcagctgcagcgggcttggctttgtgaggaaccgagtgtgtccagggatgtggcagctgcagtgggcttggctttgtgaggaaccgagtgtgtccagggatgtggcagctgcagcgggcttggctttgtgaggaaccgagtgtgtccaccgatgtggcagctgcagcgggcttggctttgtgaggaaccgagtgtgtccacagatgtggcagctgcagcgggcttggctttgtgaggaaccgagtgtgtccacgttggggggaacatcatacttgatacacacgtttttatttgcacaaagaaaatgctatttttggagccagagttttcatgtctgattgatggcgattttcttaagaaccagaactgctggcagaaagggagcacccacaagcttagatagccgatgtcttatcagagggcagtttgtggttcctgatttggaaattaacattctccaaacattccagtccaatgaaagttttatccgctttcccatataaaaactcttcccacgagagtgacttgattctcacaatcccgttggagtcgtgtgtgagtcctacagtgtgaggttcagcattgccatctccaagtgctcttcgtagggaaacagtttctggtcatgacgaggttccacttcccatctgatcccggcccggcctggaaacagaggacatgtgtttgaagatggcagtgtttggggacaggacatgagcgtattgtgtggggctgctaggacaggcctggcggggtgggggcgtgtacaagtcagtttacttggttcacaggttctcaggcccacccaggtgcctagaattggcctccaggatgggaccagaaatctggttttgcatagaaatggctagcagcaggcaccgtgccgctgtccagtctctgcccgcgtctgcccagcacttggcacagcgggacagacgcagagatctgaacccacacttacctggctgctcagtcaactcactcttcacaaagcttagaaagcggccaggcacagtggttcacgcctgtaatcccaacactttgggaggccggccaaggcgggtggatcacttgagatcaggagttcgagaccagcctggccaacatggtgaaaccccatctctacaaaaatacaaaaattaggcaggcacaatggcgggtgcctgtaatcccagctacttgggaggctgaggcaggagaattgcttgaacccaggaggcagaggttgcagtgagcagagattgcgccactgcactcgagcctgagtgacagagtgagactccatctcaaaaaaaaaaaacaaaatcacacacacacacacacacacacacacacacacacacacacagcttagaaggggctggtgttctcataagcaaagatgtctgaagagccgttagccagaatgattcttttcttttttttttttttttgagatacgatcttgttctgtcactcaggctggagtgcagtggcacagtcattgctcactacagcctcgactcctgggctctagcaatcctcccacttcctgagtagctgggatgacaggtgcatgccaccatgctagtaatttttttattttgtagagatggggtcctgaatgcatggcctcaagtgatgctcctgcctcagactcttttattattttttttttagacagagttttactctgttcccaaggctggagtgcagtggtgcaatctcagctcactgcaatgcatcccaggttcaagtgattctcctgcctcagtctcccgagtagctgggattataggcgtgcaccgccacgcgtggctaatttttgtgtttttagtagagatggggtttcaccgtgttggccaggctggtcttgaactcttgacctcaagtgatccgctcacctcagcctcccaaatcctctgcctcttacagtgttgggattacaggcgtgagacactgtgacacgggatgattttcaatcacagttttttgttacgagtggaaaatgtgtatttataaaaataaagtagtacagacatgaacgtgtagaagtctctataatcctgccatccaaggatggcacctgttaatgtgtatatcagggatgtccaatcttttggcctccctgcaccacattggaagaagaagaatcgccttgggccacacataaaatacactaatgctcgcaatagctgatgagctaaaagaaaaaaaaatcacaaaaaaacctcgtactgttttaagaaagtttacagatttgtgttgggccacagattggacgagcctgctacatatatattctaggttttccccaataggtatacttatgtgaaaatgattattgtgatactttttttttgagatgaagtcttgctatgttgctcaagggggccacaaactcctgggcttaagccatcctcctgcctcagcctcccgagtagctgggactacaggtgtgcgcaaccatgcccggctagtttctgaatgttttgtggagatggggtcccactatgttgcccaggttggtcttgaaatcgtggtgtcaagaagtccccctgccttagcctcctaaagtgctgggttgacaggcctgagccccgcgcccggccagcctcctgtgcgaggttgtgcaggactttgtcgtggaacccagtatgccttcgtgtgctggcttgtttgttggctctgtagttaacgcgctgccccacgtggacaggcattggacccacgtctctgtgtgcaggcagaggctgctgcgcgtgcatctgtgcacatggctgccaggaggggctgtgctcagggtgatctggggcaaaggctggtggcaatggggggcttgggtgtagtgtggaggcacgagagccaggtggccgagctgcagtctgtgggagctcaggggttgcttggcctctgtgtgtcctagtgtctttgtcggtgagatgggacaatgatagcacactctcacaggtgctgggggctgacaaatgtcaggtctgaggacagtggctggcccactacggggacaattccccttctctatagtcaccctgctcgtcttccatcaactgggtgctcaggacagtggcgtggtggatccgcctgtacagcctgtgctccagcgtcctgcaggccacagctgtgtccagccctgaccccgactgcccctcccaccacctccattttatagatgaggaaaccgacgcccaagggcttagggaaccctgctctgaagcacacagtagggctgctgggctcagatcctccctccctgtgctgagctgccctcctcctgccgcaagctcccacgccccaggcccaccctgctcaccggcctctgccctagttccccgcatggtgtgggagtgtggggcatcctagcttttcctcggcccccagttctttcacttccactggagtcccgcagggacagctcggggaccatgcaggcccgggtgggcgtgtgggctcacatagctcggtggtgaacagctggcacgtctctgggttgcggacgataagggccacgtagacttgaggagcccgctggtgctcccggtaggcagccagcctccgcaggaccgcgaccagcgacacgatggattctgggcaatacagcacgtctacggtgaaagcttcaggttactgaaagggaccagcggacagttccaggtcatgctgacctcagcagcagggcgaggccagagaggcagcagtcatatgagactagtagatgccatttgaccatttgggccattagatggaaaggcaattgcttgggtgaaaaaggagaacccttagtagagaaagctgcaaaagaccgaagcaaaagaaaaaaatctccagactcactggtgttccttaaaaaacgagctctggttctcggcctatctagagggctgtgaatgacacaaagcctgaccctgccatgaacttcgtgtttcaggtgtctgccgatttgtctgctggcttgcaggggtgggcctgtgtccctggccaccgctggacctgtgggtttcagggctgggacccaggaccacaggcagagctctgttcgaccagagaggagaccgagtgtgctggcaggggcgaggggttttcggtggcccagccaaacaccaccttctctcaagggccctgtcctcatcccagaagtggttgttttcctcctgtggtctctgaaagacagaggcatggctctgggacagagccatgtggtgatgactgtaatgggagtatgcctgtctccaacaagagggctgtggctggaaggtcaccttaagaggcacccctgtcctttgatgtcaccctggaggcccagagtaactcttctggaagccccatcatgtccatgcccgacagcgtccattgttcccttttcccagagcccagagctgggtagagctgcaaggacaccgcctgcacagagtgcccggggctgggcattgcctgctgcaatgacaacatctggctggatggcagagagctgatggaccgtcgcgacgtcccagtccagctgggccactgtcaccctggggctgtctaagttggcagagatgtctgcctctaatgagaggccattgagaaggacattccctcggagcttctcgaggacctggctgtgacagtcgctgaagatgtatgcctggaggcggcacatcttgcagatggccaggcctgtgaggctggcgccactgccaagctctaggacagtcctggcgggaggaaaggggaccatgtctgtgactgcaccagggtgagcctgcctcggtgtcctgccgtgcgccccgaggtcacctatgagagaaggctgccgggttctcgatggcccattctgccaggtagagggcagcttctcatgtgaccaggcctgtgatgccgtgggagatgatggctgtgctctcggagagtgtgactgagcctcccgagggctgcaccaagagagggcgagagagtcagtccagcaatcagaaggcaagtggcttagaagacaagtagccatccaccacatggctgaataaaccatgacaggaccaatcgccactcagcaatgagaagcagctaactgttgacatgccaacagcttgaacgggcctcaagggtgtcacgtggcatgaaagacactcatctcaggccacacaggattccattcatcgaacattcctgagacaacggaattctggtgatggagcacaggtcagtggtggccaggggccaggtgtggctatgaaggggtggctgccttgtgatgattcaatatgctatgtttttcctttgtggttttctgtatctatgttttatcttattttcttttgagctctgtcacccaggctggagtcagtggcacaatcttggctcactgcaacctctgcctcctgggttcaagcaattctcctgcctcagctgcccaagtaggtgcaactacaggcatgtgccaccatgtgtggctaatttttccacttttttttgagacagagtttccctctcgttgcccaggcaggagtgcaatggcgtgatcttggctcactacaacctccacctcctgggttcaagagattctcctgcctcagcctcccgagtagctgggattagaggcacctactaccacacccgctaatttttgtatttttagtaaagacagagtttcaccatgttggccaggctggtctcaaactcctgacctcaggtcatccacctgcctcagcctcccaaagtgctgggattacaggcatgagccaccacgcccggcctgatttttgtatttttagtagagacagggtttcaccatattggccaggctgctcttgaactcctgacctcggatccacccacctcagcctcccaaagtgctgggattacaggtgtgaaccaccacaccaggacctgtcaagtattctttgaggactggacaccaggtccttgtgaagcaggtagagtgtgtcacctattggacaaatgcccaacaaccccatgagacatgctgttgttgttgaagtgctt

SEQ ID NO: 94410 - DNA, 56551 bp, Homo sapiens
gttttaaaagacctacatatacagaaagatatcccatgttaatgaatcagaagatgtaatattgttaaaatgacactaattcccaaattgatctacagattcaacataatccctatcaaaattccagctgacttctttgcagaaattggaaacatgatcctaattcatatggagatagaataaccaatcttggaaaaaaaaaatttggaagactcacatttcccaatttcaaaatttactacaaagctagagtaatcggcctggcacagtggctcatgcctgtaatcccagcactttgggaggccgaggcgggcggatcacctgggtcaaggagttcgagatcagcctgactaacatgataaaaccccatctctactgaaaatacaaaaattagctgggcgtagtggcacgcacctgtaatcccagctactcaggaggctggagcaggagaattgcttgaacctggaaggcagaggttgcagtgagccaagatcgcgctattgcactccagcctgggcaacagagtgagactccatttcgaaaaaaaaaaaaaaactggcgtaatcaagacaatgtatactgatataaggatagacatatggatgaactgaactggcgtccagatataaactttcacatttaggtcaatttatttttcatagagtgtgaagacaattcaatgggaaagaaatagtcttttgagcaaatgaactggatagccacgtgcaaaagaatgaaactggatccttttctcggaaaaagtaacacaaaatggataaaaacctaaatgtaaaagctaaacctatgaaactcttagaagaaaacaaaggagtaaatcttcatgaagtccaattagacaatgatttcttacatatgataccaaaagcataagtatcgaaagaaaacatttataaattggacttcatcaaaattaaaaacttttgtgcttcaaagtcactatgaaaaatgggaaaatataacctaaagaatggatgaaaacattttcaaatctggtaaggaacttacatctagaacatattaaaaaaaaactcttacaaatcaataataaaagacaacctgacttaaaaatgggcaaaggatctgaatagacatttctccaaataagacataaaaatggtccataagcacatgaaagatgctaaattttattagtcatcaaggaactgcaaataaatacttcatacccactaggatgattataataaaaaacacacataacaagtgttggtgaagaagtagagaaattggaaccttcattcactgctggtaagaattaaaatggtgtagccactgtggaaaagtttggcagtacctcaaaaatttaaatatggaagtaccattcctaggtataaacgcacccaagagaactgaaaacatatgcacacacaaaagttcaccgcagcatcattcagaatagtcaaaaagtggaaataatccaagtgtccatcaatgatgaatagatttttaaaatgtggtacagtcatacaacaaaaactatgtagccataacaagaaatgaagtacctgatacatgctacacgcataaacctttaaaatactctgccaagtgaaagaagacggtcacaaagggccacatacatcttttataggaaaagtccagaatagactgatttagtgagacagaaagtagaaagtatatttttacctttcaaattaaattatttttaaaaatgaatggttcaagaatttatatgctatgtttttctaaatcctaacaatcttcttctaaaatatttttaagagagaaaaaagcatgctatggatcaagaaaaacagacctggaattttaaaccagctaaggaaaactctaaggcagaaaactcatttgactttgtggaatgctattgaatgttcccttcaagctgaattttggtcttcgtttgaatgggaaattactacaaataattaaactttattgtgtgaggcatggtggctcacacttggaatcccagcactgtgggaggcagaggcgggcatatcgcttgagcccaggagttcgagaccagcctgggcaacatagtgaaaccccacctctaccaaaaagacaaaagttagccgggagtggcggcaggtgcctatagtcctagctactcaggaggctgaggtgggaggattgcctgagcccaggaagtccaggctgtggtaaactgtgatcgtgccaccgcactccagcctgggtgacacagtgagaccctgtctcgaaaaataaaaataaaaaaaaaccttactttgcaaattatctgtatattttacaaaagcaatcataaatctaaagttgaaattcattagactttatatcacagtaaataatttctaactaaatggaacaaatacttaaaatactccttggaatagtataaatagtataactttggagtcagatacacaggtttgaatcttaccctatttacaagcttggtgatcatcaacaatttgtttggtttctgtgggcctcactccctgtttttttttttttttttgagatggagtttcattcttgttacccaggctggagtgcaatggcgcaatctcagctcactgaaacctccgcctcccaggttcaagcaattctcctgcctcagcctcctgagtagctgggattacagggattcaccatcacaccaggctaattttgtatttttagtacagatggggtttctccatgttggtcaggctggtctcgaactcccaacctcaggtgatccgcccgcctcagcctcccaaagtgctgggattacaggtatgagccaccacgcccagccactccctgcttctaataaatcaggaattataatacctacagtgtgaaaagaaatactccaaatattcactaaatgggggaagagatggataatttcattctgtttttctaaaatctatttctgctgttcatatttttttaacaacttgtatgtaattttaaaacataatgaccaggtgcagtggctcaacacctgtaatcccagcactttcggtggccaaggcgggcagatcatttgaggccaggagtttgagaacagcctggccaacactgtggaacttcgtctctattaaaaatacaaaaaaattagcctggcatggtggcgggcgcctgtaatcccagctgctcgggaggctgaggcaggagaatcactggaacctgggaggcagaggctgcagtgagctgagattgcaccactgcactccagcatgggcaacagagcaagactgtctcaaaaaaacaaaacaaaacaaaaccatgatgattttaaaaataaaaacatctgttttatagggtactcatgaagccagtttgtaaggcacctacacacaggagattctcaattaaaaaaaaaatagtaatttccacagctctattcctcacctcttccaaagcttcttcaattctgcctttccttttttgagatgaagactcgctctgttgcccaggctggagtgcaatggcacgatctcggctcactgcaacctctctccctggttcaagtggttctcccaagtagctggaactacaagcactgcccaaccccctccccgccaccacgcctggctaatttttgtaggccccccaccacgcttggcttatttttgtatttttagtagagacaaggtttcactgtgttgcccaggctggtctcgaactcctgacctcaagtgatccgcccactttagcctcctaaagtgctgggattacaggcgtgagccacctccttaggcccaattccaccttcttgaattcaggtgaacaagtcacagaagaagcaaagttaaacatttatttttctgaaggctaaggttataaagaacaacaaaaacaataaaactaagcttttaaagatttttcctcagaacataaacaaataatttaatccaaaaagaaaaatatttccatgtttactgatgctaatcattttattctgaaactccgtgggttttttgcaggagtgggggattgcaatgtaagagagtaaaacgataatacatccagaaaaaaggaaatttgataccttaatcttttgaccatcaaggaaaattcaggattcaggtcagagtacatttttcactgaaaaacacagtgcaaatacaattaatgacaatgacttatttagcaagtaaggtaaaatataagttccacctgtatgaaaagataattttgactttgagagtacacttagatgaatgtcatttaacagatccaggttgtcaccttatattttacacaatatttcgagaactaagaactttctcttccatattctaaaagatgaataacatgaacatatcgggaagcaccatcgttttgcaggtccaatgggtgtcattttaaaaccacccaagtacactgagaccgctaacgctagtaatgtggtgtttggcagctagttttaatgactgtcattagagctttattttttattttctttttatagagacgagcccaggctggtcttgaactcctggcctcaagcgatcagcctgctttggcccccaaagtgctgggattacaggcgtgagccaccgtgccagcctcgttagtttgaaaagcaccaaaagctatccataggaatgtgaactttagcatttcctatcaagtatgtataaatacataactgaaccctcatacagcataaagcttataaatcatatactgaggccaggcgcggtggctcacgtctgtaatcccagcattctgggaggcctaggcgggcggatcacttgaggtcaggcgttggagaccagcctggccagcacagcgaaaccccgtctctactaaaaatgcaaaaattagccgggcgtggtggcgcgggcctgtaatcccagctaccccgaggctgaggcaggagaatcgctagaacgaacccagggaggtggaagctgcagtgagccgagatggtgccactacactcccgcctgggcgacagagcaagattccatctcaaataaataaataaaataaaaaataaatcatatactgaaccatttaacaaatacatatattcctgagaaagaatttcctgggggcattatcgcatttctagtttccttattttagactatttcagagggagatagggtctccctctgttgcccaggctggggtgcagtggagctatcgtagctcactgcagcctcgaactcctgggctcaagccatcctccagcctcgacctcccaaagtgctaggactaaaggcgtgagccaccgcgccgggccggagcctctgtctgcaaaggtgaagcagtcagtactgtggggcgacacaaccacgacgtgcgtaactatgcgatctccacactgcggagcagttgaacgggacaataaaagctcgcgtggtgagagcttgtgggcgagtgactcccttccagctcacgccagccacgcataatccaactccgggtgccacgccgctctctgcagccctggctggtgacgccgagccctcagcccggccttccgcggcggcggctctgcctcgctttcctgcccacgtgtcagcccctgcacgcccggccccggcctgaggccgccagaggacaggccagggtgggccgcccgttccgagggcgcgcgggcggaaaggaggggcgcccgtgactcacatgacccggtccccgaccagaccgccaagcctcacccacgcggcgctcggggggactcggcctctgagcgccctacagaggccagcccccgaccccgacctccctgggctacccccaacccccctgagggacccccgcggcgcacatacctgagagccccgccggaggcgggtgcggcctccgggcaaatccggccgcccgtgggcccgccccgacccgccccgacccgccccgaccttcccctccctgcccctcccgtccgttcccctccactctcctccccgcccttcctctcccctcccctcccttccccactggcgcgcgagcgtgcgcgccgagcccgcccgcgcctgcgcgcccccgacgccccgccggcgcgcgctgccgccagcgaggcccggggaggccgcggcggaggcggaggcccggcgccctgggcggcgccctgtccccgaagtccgtcctccccgttaggtggcgagcgcccgaggggaggggacagccgggcaagcaggaagctgcggcttaaaagggcaacccgcgcgggacccttcctccctagtcgcggggagtctgagaaagcgcgcctgtttcgcgaccatcacgcacctcccctccgcttgtggccatgtaccgctacctgggcgaagcgctgttgctgtcccgggccgggcccgctgccctgggctcggcgtccrccgactcggccgcgttgctgggctgggcccggggacagcccgccgccgccccgcagccggggctsgcattggccgcccggcgccactacagcgaggyggtggccgaccgcgaggacgaccccaacttcttcaagatggtggagggcttcttcgatcgcggcgccagcatcgtggaggacaagctggtggaggacctgaggacccrggagagcgaggagcagaagcggaaccgggtgcgcggcatcctgcggatcatcaagccctgcaaccatgtgctgagtctctccttccccatccggcgcgacgacggctcctgggaggtcatcgaaggctaccgggcccagcacagccagcaccgcacgccctgcaagggaggtgagcgtcggccgggccccgtcccgccctccctgcctcccctgcggccctcccctccggcctcctgccggtgcggggccgctgctcagcccagcccagcccagctggagcgggccgggtccccgcccgggtcaccccgcctcggatgtggccggctctgtggatggtgatttttccgccttaaaatcatcatgcgattggcctgccccctcccccgcgccgtcaccccgggcctctgtatatgctgatcttgcatgcagagtagacgctgcaccggtctccttttggtcccggtgtctgtgtcacacacggcgggtcctgccgaaatgcacttctaggaaagggaatgacctgcccgtgtgataatgcctcgtcagtgttcttgggcttttgtgagtctcccctaaatgcaagctgtcaaattattttctggtatttgttcactcctgttccaatagtgacagatgatatccgaacatagaaaatgacttggcttctaagtttgaaatctagacagttttattaaccaaaggaatttactaatcacgcgttaatcgtttcaattaagtaattttcccattctgacaagttctgttttataccaaaaaaaaggaaaaacacaaaaaaatcacaagcaatgtaatatctctgacaaataaacacctggcgtcctgacagtaaatttacaggttgtaggctgcggatggccagccagccaatggaatgaaatagctctgggggtgtgtactggtcctggctagccctgaatttgagcttcaggaaaaatatagtacgtgaagaaaggggtcagataatgtttggtagtcactgggttatcctgtggtttaaatcatttaatgtctgtagatttggcctctgtagtcagattgctttcttcgagcaaataagagcttttttccccccaatacattgcatcatacctctttagtaacataaaatggaaaggacaaaccacttttgtctactgtaaaaaagaaaaattatatggaataaagagcccagggaggcgaggagtcttgttggaggtggattggctgagaagcacagaggatgttgggctagacccatgtctcagtaaacctggttctgtggtctttcagttatgcccgctgacttatraggatttttagaaatcctctctgtaccggaaaaaacttgagcggtgctggtgttcccagcaggggggacaaaggttgtttttaaagatttactaaatttgcattgaccccgcccacttctaggacttaactttggagcttaattatcccctagctctggttgcctcagccaaaaccaatgtttgaaccactttgacctctgatttcctttctagcttcaaaattgtataaaatgtacacaccgtcagtctcctacatttgcctgccttcttcctaccactcccttattatccaaaccaggaaaacaagttcagactccaaagaaaggcaaataaggatgttggaggaagttcaggcaatgtttagcaaatattgagttgcatcgttttcttaaaacggacatcaagtttattttttactatcttgctggcagcatttgccagtcctttaaaaggtgtacagataaatcagtgtatgtggttttctgcaggatgatttggtctctgaaatcctttttcttcgattcttcagatgcccagctctctcctgtttttataagtcgcagctccgcaaactcactgaagcaactcgtttaccatagtttgtgagtcctctttctcttgttgccacagcagttttaatgccaaaatattgaacctagcaacaaattgggtcagccataccaaagcactgttactgtagcacttgcttgtactagagtgtaagatacaattttctgttccgtttatcccatttacaaaaaaacatgctattaacccccagcatataaacagggagaaactgaattgttactagtaaactgttgcaagcattgatagaacatcaaagaaaattggcctctacaaagtgacaaatttattatcttcaggaatttgaaaggctttctggattggggaagattacatagctatgaaagcccttaaatattttagtttgcttaataaacagtatactaaacagatgatcagcaaaatttgggtactatagccttccatgctttgtgttcaagacatccccagatctatctacccatttatcacccttgtttgcagagaatgtgcattgtaagagagacaggtcttctttcttaaagcttttttaacgtctaagaaattgttaacctttgtagtcccactctagtcttagaaacacagaatatattaggtgattgagatttttttaaatgctttggataatccctatgaaattctgtctttccctcktaaacatattttaacacgttcttcttacctctccccactaacctgtcttctctcccattggttctttgccaaaaaaaaaaacctcatctgcctctctccacccttttaccaaccttcagctttctgtatctcattttccctcaagaacaaccttatccctgagttttctaaattaaaattcttgaggttgaagcaaagcaacaatctagcaataatctctaagggaaacagatggttataagacttggtggctgatgtgtactttttccaagtaaatatttaataatacacactgtttttgtgcttttcttttcccagttactacatgtacctgaggccgttagatttgtctgtgttaaggatttgaaagggtaagctaaaggatctgaagggaagtttaagtgaggccttaaaaatatttccagcaaaggggcatagtgtgagaatatgcgactgatttgagaagactggttcaaaagttctggtgggtttggaaatattatcaaagattgttctattaactttcccagagtaaattatctgtatttcatttgctatggttctgcctgagaccagtctacctttttagaaggaagtttattgttttaaagtcagtttggagggaaagtacagattgataatagcaatttattgatggtaggagtcaattaactttctcttccagtctgccccccccagttgtcttgatattaaaactattaaaattccctatcactgatgctactatcataaaattttctaaaattatcataatttacatatagttgatggaccgtagatggagttctctcatacattgaccctaagtcttttaattacaaatattagtacccaaaaaagtgtaccctatattaatccagtaactagtttttaaaagtcaaaatgccagaaggaaacagtggaatcttgatgacataatgcaagggaagaccggagtcaatgcagtgttaaagacgccctcagcctctgggatgtcattgtttagygcttaagggaagactatagaaagcactgatactgatttaaaatgagatatttctctgccttcactgggggaaaaaatgtttctgacttattttgctgtgctcaattgacaaccatcaaaacttaggtaacttttaataaactcacagtttctaatatttttaagtggctgtgtgtctgcatctgctgccacagataaaatataacctttgtaggtgaatttaatttaggacttttctgaaagttcagtcagaggataggtaatttgtgtgtcttttaaaagcacttagccccgaggttgttgtttttaatacatcttatttaaatacggaaatgtgttgcccttatgcctttttatttcatggaagccaaatgcgtcttttctcccaaagtatactagaaaatgaagacscttggtaatggtagtgatctgtacatcagatttcagtctttctgtcacttgcgtgtatgaatccatttagcaagtttgcttttggcagtaaagccccacgtgcaggaagacaaacagctgctcactyattatccaaagtatactttgtaagaattagggcatcaaaaattggatcctaagcaccaatatatattaaagttcagtacaacttgtagtgtttaagtacaagaaataaaaattgagcctgaacttttggcatatagtgggaagaaattaggtttaccgctgttaataattcagagtgcttaggaaaatcggtttttatttacttatgttaaaaatactaagggttctgtaaccattaaaaactaaaatactaacctgtagatgttgaaaaaatcctagacactagtctctgccacgtgactgttcttcttttctatttattttacccaataattaggcttttacaatgtaagtaataaagagaaaaatctctagtatcactttaragcacattgattcataaatagcccataaattttgtactcagcaacccataaaatacacatgcatgattcacataatcaaatagtaacgaaagttacaaaatgaaaagtgaagcagctctaccccaagtccttcccccaatataaccatgaacagtcttaaatctaatgccgctgtctaaaactgactagttattcaaatgaatcaatattttcccctttccagaggcagaaattaatacagattcaagtgttcactatcaagtcggaattgttaatatgtgaaatactactgttaaaggcaggaaaggctttattaaggacaagaagacaaactaggagaaggagctactcaagaccttccgattatctttacaaaaaggcaactacacctagaagattctgcagccacacacattctgccttcacttgaggtcaactgccttcaccaaggtcagatattagcaaaggctaacatttattcagctctgtgtgtgccaggcattttattaagaacttttcatgcatcatcagttctatgccttatagcaacaatgcatgtaagaacttttcatgtatcattgcttttatgcctcatgcaatacactgttgtccctgatttccaaatgtggctactaaggttgaggagtgaagtgtcctttggcagggtgacacagctagtacgtagtggagttgaggttcagattctgggcatctgattccagcacccaccttaatcattgttgtctgggatttatttatgcaaaaagttacaaattgtatcttaggcttttaattgtaagcgctgattgagaaccacttcatgccattgacacaatgcttcctaatactttggatcatagatacctttgaaatttctgttaaaagctattagaagacctaccttcttcctagaaaaatacatattcaaacagctttgcatataaaactcagcatagatgatatctctagaggtccatttattctaattgctaaggaaatgaaataacctttttcccctayacccaactccgaagacctgaaataacattttaaacagttttccatcaaaagaggtttgaagactttggtgtttaagagattaatgtgttagccagaacaactcatttctctaccagtgtgtagtccatttatctttaaagattttctattgaataattttgaaattactttcttagttttcttcattaaaaactaagaaaatgctttgtttattatgaattgctatttctcttgattattattcttggagaaagtctatcagacgtaattcttctgatttgcttctaggctagaggaaaatgtgaaagatgacaaatgaaaatttcaaaggttgtcagtagtatgacttcttttatcgtttgtcattatcacaaatatatcaacataggacttttaaaagatattttgtacatattgggccttagtaggattttgcatgaattttttttttcttttatgccaagagagaaagagcaaagaaataaccaagggtgatgtactcgtattgaaggtttaccaaataaggactgcttttattatgaactatagtctatattctaagtaaatcaatttttctattatgtgttttttgttcctgcaggcaagatctctgaactttatgcagagggttcttttaaaaaaacaaagttgaatttttttatttcttggaatattttttttcattgatttctcccaagtagagcagattcaaatctcctttgtaccctatgtcttttttgttttgctataagctcagtattccatttctacattttcctttcctagaaccagtcaataaatgacaaaaaaaaaaacaaaacaaagtaaatcatgtgttgttgcagtaggagttcaaggaaaccaaggacaatcttgtttgtttatttgtttttttgtttgttttttttttgaaacagagttttgctcttgttgcccaggctggcatacagtggcgcgatcttggctcactacaacctctgcttaccaggttcaagcaattttcctgcctcagcctaccaagtagctgggattacaggcatgcaccacctcacctagctgatttttgtatatttagtagagacagggttttgccatgttggtcaggctggtctcgaactcccgacctcatgtgatcagcccacctcggcctccyaaagtgctgggattacaggcgtgagccaccgtgcctggcagacagacagtcttgatgtgggaacagagaaggctggataggagttggataaggccatttcagataaagagggggtggcttcacccaaggcaggaagtggaactgtgtgtaagggggtcatgaggacaaactacatttgtaaataatgagaaataagggcttgtgacagtaaatatatttggtctctttgcctggttcccaacacagagctcctgaatgtcgcaaattcctgagtgataggagcatcttttgttctaactaggacactcttaatgggcttctgggtagcttcaaggtggggactagtcaccaaaaagaccaagccataattagaaatttggaactttcagtcccaccctttgacctctggagattggaaaggggctgaagattgagtttaatcagcaatcagtcatgccctcataatggaacctctatacaaaccctaactgatggctggagtatggggagagttcagagagcttccaggttggtgaatgcatccatgtatgggtagggtggtaccctccaaattccaggggaacagaagctcctgcagtggggacattccagacatggccctgtgtacctcttcatgttgctgttgatttgtatcctttacataagtaacgtttccctgagtcctgtgagcctttataacattattgaacctgaggagggggccatgggaaccccctggttggtagccaagttggacagaagtgtgggtgccctgggcacccaagacttggaactggcatctgaagtagggaacagtcttgtgmgactgagcccttgagctgtggggtctgtgctaaccctggtagtcagtgtcataactgaattgcaggacacccagtttgtatctgcagagaactggagaactgcttagtgtggaaaacccacacatttggtgtcagaaatgtgtgagaaaaaacaattttttcctttttttttttttttttttctttgagacggagtctcgctgtctcccaggctggagtgcagtggcgcgatcttggcttactgcaagctccgcctcctgggttgatgccattctcctgcctcagcctcctgagtagctgggactacaggcgcccaccgccacgctggctaatttttttttttttttgtatttttagtggagacggggtttcaccatgttagccaggatggtcttgatctcctgacctcatgatccgcccgcctcggcctcccaaagtgctgggattacaggcgtgagccaccgcgccaggccaattttttccttttatgtttgttggatgaataatgatgaatctagcagggcacagaaagctaggcagcagtggaactgagaatgaagttatagttaatagcagagaatgaaaaagaaaagacagataaaacattttgaagaaaggacagtaatgtattcccaacaggtaggatttacaggatgaaggagagaagaggcaaagataaccacaaaatttctagcctgagagactggtagaaaaaaatggtggtatcagggacagatggggttattaaggaaaaggattggatttttaaaataaagaagatstggtgtaaaattatccttagggaaattggaaatccaggcacgtacttctctccatcatgcccttgaatagtgcagtccctctgcctgtccatgcctcacttccccctccctaggattcctctgcctctcttaagacccatctcaaattatcacgtagacttgtaaataatttatatgaaactggatagctgaggtttcaagcctttatccctttgaaactttttaataacaagttattgttaccttttactaaatccaactttatattcaccattttaactagcatcatttccgattccaagacctgtttggtgtgaaagtgcagctaagttactgttaatcaagatcagaataaaagaatctaccaagaaaaattaacaaaatcccccttttaatgtataatcttccatctgtcaggctgtaagttaaataacacaaaacaaagctgtatgttttatggatatgtacatatataattgcagggaacatgatttggaaggatatacacttacattgctaagaatagtcacccctaaggagaagactggggtcataagtggaagtcaagggagtcttcagctttctttttgtatttaaattttgatagaaatacatacatatgtgttataattttaaatttttaatgaaaaaagtattcttccgttttttctttgatgtgtcaataggttatatttttctaatatcagctaaacatttgcttcccagaaagcttagttacctcttcaaaatttattcaggttaaaataaaagatttagactggattaaaaatctaagatgatatttgcctactttatacaaaacagtacattgatgctgctaaagcaattaaagtataatttttctggtttttttttttttttttggagacggagtctcactctctgtcgcccaggctgaagtgcaatggtgcaatctccactcattgcaacctcggtctcccaggtttaagcgattctcctgcctcagcctccccagtagctgggattacaggtgtgcaccaccacgcccagctaattttgttgtgtgtttagtagagacagggtttcatcatgttggccaggctggtctcgaactcctacctcaaatgatctgcccacctcagcctcccaaagtgctgggattacacgcgtgagccaccacgcccagcctaaagtgtgtactttttcttagctcctayatgcagtgctccttcccatgctgaatgtctgaatttttatctgagacgtagtatttcaggtggtcattacttgtgggtggtcattgagagttcctccctgcttctaaccttcctctcttcattttaaattaagttacgctacattattgtgggttagaaggtacattaatattaagtgaaaaaatataatctgatgagtaagtggcaagagtgttaacttataaatattaagagttgttctgaggcatttttgcttttctggtggttctgtgcttctggtagaactcttggttactgaataaatagttcctgaaaagtgagagagtgcagctggaaattagatttctgatgaataaatcaaaccctattaagagaaccaggttcaagtaattttaaaaccacttgaattttcataaatgttttgttaatgactaattataaaaaacagtgactagctggaggcttttgtgtgtttgcttttgagtcagctaggaaaaggaaaaaaaattcaagcttagtcaattgtggttttcactgaatcttttttaaagtaatgagctggtttgttttcttcatcactatagcaacttaagctagtttctgcttttgatttttatttctcctagagaaacttagcatgtactgctcattagacttgagcatactaaggaatatctgtggtaattaagttaaaaatcagatcagtgctttgtactgtatatagttgcagatgtctgcatttcactaatattctttggaaacatctggataccagttaacataaaataactgtttagtcagtttctgttcagaatagaaggaatgatttaaaagttcccattgtagtacatacgtcattctatcccctgcccttcctccagctttactgagattgataaataataaacgtcatgggtggtgtgtctttagtttcctctggtgagctgagtgcacagattactttgtcagcagggtggccttgatttttaggccatgtttctaatggcatcagttctgtggctgacacctgtgtaccaagcccattcactgtctagcttagccagccgtggactcctgctctttgttaaaagtatttaccttcattcctactagcacagttgaccaaagacccagttgatcccaaacactagtaatgcatcaatggagtctaacagagttttaagatgtggtgtgtgcgtgtgtgtgtgtgtgtagagatgggatctcactatgttgtccaggctggtcttaaacacctgagctcaagttcttctgcctcagcctcccaatgtgctaggactacaggcatgagccaccatgcctaactgtctaagactttgggatacaaaaayataatttactttcctycatttctggaataaaacatctcttccttcctccttctastttctgttctgtgcccctgtttgatctctgttggtcctgttcaccttcagccttctctgctgaaggaggaaaggcttggttttataaaaagtgacaatattcagaycacataagatccttcttgcttcattttggcttaaatattttaagattttctgattttcttgtatrtgtatgtattttcctattatttgacttttttgaacaacttcaaattgagtatatttgaacgagagtaggcattcaaaagkgctaggctttccctgcctttcagaactttgaggtatatgtcacatcattttgtccttcacattctccagttgtgctaatttttcccaatccattgagttaagtagagtaccttcctttttgcagtcatattcttacttttttttttttttttaatttttttgagacagtctcaaactgttgcccaggctggaatgcagtggtacaatctcagctctctgtaacctccgccttagccttgtgagtatgggactacgggaatgtgccaccatgcccagctaatttttgtattttcagtaaagatggggtttcaccatgttggccaagctggtctcaaactcctgacctcaagtgatctgcccagctyggcctcccaaagtgctgggattataggcgtgagccaccacatctggcccctacataaatctcttcgtgtcccttagaatgtagttaagacttattttcaggtgacagtatatttttgatagttatctttggtttccaaacccagagaaggaagagtaactggcttcttctgtgtgtgggtacattgtgtcttattggagattgttttgtctcaagtattgctgcagagtattttattaatgggtgcactttaaaattttttgtttttcagactaccrgtttaggtakcccagtactcaatatttgccaatttctagaattaaaaacatgtatgaatcactggttaactagaaatttaaaatgaaaatgtktcttctttagcccaggcaatatcacttgcattcatttctatcccctccctgtccctgttctgttggctctggggsttcttccactaagctggtactttctttatagctcctcctgtgcttccattcactaaacctttattggttcatakcctacagaaaatgcctgtggtgtgagaggtaatttgtgaaactgcttctcttcactgtttagcagttgagctctctaaatgggtgtagctgggaaagaaaacttaactttacaaacaagaattcctgggttccatccagyggaacatgtctyttgttatacacacacagtttctgacycatgtcattccatgacttatgataaaatggacattttgtttacactgttgtgtggaaggagrggtctggtttctaatttttaataacatctatttctagaatattaggcttgccatttgaatgcttctgtttgatttatgaatatcattggttccagcagtttttagctccccactaaatgcaagttaaaatttttaagtttctaagttaaaagaaagtaacatttcctccacttaagaaagcaaggaaaattaaaaataatgtggtgatgacttccacaggctctaaaagagcaatggaaaaagtgatttatgtgtgggagaagaaatactagttcttttttttttctttttttttttttttttgtattgatcattcttgggtgtttctcacagagggggatttggcagggtcataggacaatagtggagggaaggtcagcagataaacaagtgaacaaaggtctctggttttcctaggcagaggaccctgaggccttccgcagtgtttgtgtccctgggtacttgagattagggagtggtgatgactcttaacgagcatgctgccttcaagcatctgtttaacaaagcacatcttgcactgcccttaatccatttaaccctgagtggacacagcacatgttacagagagcacagggttgcggggtaaggtcacagatcaacaggatcccaaggcagaagaatttttcttagtacagaacaaaatgaaaagtctcccatgtctacttctttccacacagacacggcaaccatccgatttctcaatcttttccccacctttccccgctttctattccacaaaaccaccattgtcatcatggcccgttctcagtgagctgttgggcacacctcccagatggggtggtggctgggcagaggggctcctcacttcccagtaggggcggccgggcagaggcgcccctcacctcccggacagggcggctggctgggtggggggctgacccccccacctccctcccggacggggtggctggccgggcagaggggctcctcacttcccagtaggggcagccaggcagaggcgccccctcacctcccagaagaggcggctggccgggcggggggctgacccccccacctccctcctggacggggcggctggccgggcagagggactcctcacttcccagtaggggcggccgggcagaggcgccccctcacctcccggaagaggcggctggccgggcggggggctgacccccccacctccctcccggacggggcggctggccgggcggggggctgaccccccacctccctcccggacggggcggctggccgggcggggggctgacccccccacctccctctcggagcggctggctgggcagaggggctcctcacttcccagtaggggcggctgggcagaggcgcccctcacctcccggacggggcggctggccgggcggggggctgacccccccacctccctcccggacaggtcggctgccgggcggagaggctcctcacttcccagatggggtggctgccaggcggaggggctcctcactcctcagacggggcggctgccaggcggaggggctcctcacttctcagacggggcggttgccgggcrgagggtctcctcccttctcagatggggcggctgggcagagacgctcctcacctcccagacggggtcgcggccgggcagaggcgctcctcacatcccagacggggcggcggggcaaaggcgctccccacatcgcagacgatgggcggccgggcagagacgctcctcacttcctagatgggatggcggctgggaagaggcgctcctcacttcctagatgggatggcggcagggcagagacgctcctcactttccagactgggcagccaggcagaggggctcctcacatctcagacgatgggcggccaggcagagacactcctcacttcctagacggggtggcggctgggcagaggctgcactctgggcactttgggaggccaaggcaggcggctgggaggtggaggttgtagcgagccgagatcacgccactgcactccagcctgggcaccattgagcactgagtgaaccagacaccgtctgcaatcctggcacctccggaggcctaggctggcggatcactcgcggttaggagctggagaccagcccggccaacacagcgaaatcccgtctccaccaaaaaaatacgaaaaccagtcaggcgtggcggcgcgcgcctgcaatcgcaggcactcggcaggctgaggcaggagaatcaggcagggaggttgcagtgagctaagatggcagcagtacagtccagcttccgctcggcatcagagggagaccgtggggagagggagaccgtggggagagggagagggagagggggagggagagggggagggggagggggagggagagggagagcactagttcttaattaatacattgttttactatttcctgtgaatttatgtagaagtaatgaaaccaaggtttattaagtcattttttcaaactcctgtcagtttagactttttaattgctttgttacatgccattactttgtaatacttgttatagcagtggtaatagttgagatttgcctgtttgaccacttgcagggcaccgtgccagattccccatgtgcratgttcctcgcagtcgtgacacccatcstaggagagtggcattagcacccctccatgcaagcggatggtgcaggctgggtcgcctgggcacagcgccttaccatttccctggcttagtgtagttatcattaaataatatgtggtattacttagaagcattttgaataatttgaaaagcacattttagtgtttaaacaattttttttttcttttttctttttttttttgaggaaaggtctggctctgttgctggggtttagtgcagtgacctgagcgtagctcactgcagcctgcaactcctgggctcaagtgactctcctgccccagcctcctgagcatcttcgactacaygcacatgcccccacgcccaactcaatttttttttttttttaagatacaaatgattcatcttaatattatttacagtttttttttcccttttctgtgggctttatctgactggaaattctttttaaattttttattttttaaattgacaaattgtagatrtatatttatgaggtacaaagtaattttatgatttatgaatacaacattgcataattaagtcaagctgattaacctgttcacyactggaaacaattgcaaatmattatcattttttctggtgaaaacatctgaaatttactcagtgattttgaaatgtgcagtactttttgttgttgttgtagaaatgaggtctcactatgttggccaggctggtttcaaactcctaagctcaagtgatcctcccacctcagccttccagtgttgggattacaagcatgaactaccatgttgggccaaatgtataatctattattatttactgtattcaccatgctgtgcaatctatctcmaagaaayktattccttctaattgaggctttgtaccctttgaccatcatctccccrtcacccccattcccagttttgtatactttgagtcctttcatgataggtatggaggcttatggtaagttatttaaaacttaacatgtatgtcaaatatttttgtggccatagcttttctttctttttwaaattttaagagtcagaatattcgtatattaattcggcatgtatttgagtgcctaatatatgccattttctatgttaggaacmaggaattaaagcagtgaacataacaaagtctgccctcgtggtgctaacttgccaggtagggaagccagataataaacacatgtataatgcaaagtcagtaataataaacgatatgaagaaacaaggtaggagaggcaggaaagtgggagtgagaaagaggtgctcttttaaatacagtggtcaaggggagcctctcagaatgaagtttttaacagagacctgaatgaaatgggggagtgagctatacagatatctgctgtgtgctggaaaaattacctgtaattttgcattccaaaagtttaataatgactacatttatttcacaatttgagaatcagttatrcayaagatatagttctaagcacatactccyctaaatatratttgtttgtacagtagaccaaataagtatgttcagcttagaatatgctctttatggtcatgtgtacaataaataaattatcttaaaacattrtcaatattaaggttgatgttttcagaaacatgtaagaaagctagcttttaaaattgactagggaagttctctcaaactgccagtccatgagatattgtatattttctatctgaaaaacttttaatctcagaattctttaaaagagctctccctggggctcccattacttacttgtgactcccagtggaaatcgtacccagcccctcgagaggggctgaatmtgttgggagtgggagggtagaaaaaatgctgcagcttcttgtgggtatccttcacacacaaacacccagtgycccaagcactgtgcagtcaaacatcaaccccactcagactttcctccttgggattgagaagcaatggattatagagaaagaaaggtggattagcactccaaaactttgaagagtaattgaccaagacccccaaagccaaagctgtggscatcsccacttccagtataccctgtaccaacacgtaatggctactagatacaggggcactagtacctacctgtctgcttggctacctgccctctttgcagaagtggtgaaggsaatcactcaacctcagaaarggaaaatggctttctcattttcagattgaaagaggttggcagtgggtgaggagaataacargtaaggatctcttttaatatacccatttgaagccaaaacctcwgtttagacatacggtattttgaacctggtgattattcattgmccatgtttgtgaattatcagaaagcagaattcttgccaggcatagtggctcatgcctgtaatcccagcactttgggaagccaaggtgggaggatcacttgagcccaggagtttgagaccagcctgagcaacatggtgagatcctgtctctacaaaaaattcaaaaattagctgggcatggtggtgtgcacttgtggtcccagctactcaggaggctgaggtgggaggattacctgagcctaggaggttgaggctacagtaagccatgtctgtgccactacactcagcctgagcaacagagcaagaccctgtttcccacccctacccccccaaaaaaaagcaacctgaattcttgaactccctgcaaccaggtcacccaaaccaaaggtaaaaggaacataaaaaagccttctggaaagtgtacagaaattcattgcagggtgatttttgtcttgtgaaatcatagttactgttattagcaggtttttwtaacgttttatattcatttttcatggtgttctgatgtacaagctgcttcaagtgyttttggacatagcttggatgtaaaatgtaaaaagtggatattttcaatttgtagctttcttttttgaagcttayttaagtttgttctaaatatawccccttctttctcacccaccccaacacatttttttaaaaacaccaccaggtatccgttacagcactgatgtgagtgtagatgaagtaaaagctttggcttctctgatgacatacaagtgtgcagtggttggtaagtgatcgcctttcttgctgcctaatgagaactctggggaaatatgtttacamacatgttactgttaagatgctgtagaaatataccttatcagaactgattttttttcaagttgtaatctttaagacctgcatcatttttcaattagtctaaattaagatatagccttttttttttacatgggggattttttaaaataggagataattggattttaagtctagatctttgttttcaattcctcaacacattctgtaaataagaccaaattatagtagaaggagagtaaataagctattatcttttagaagtggtaaagagcactgattaaatatatattagaacttggctagccaattttattgaacaatttctgttcaacaaaatgttgtttaaagtacagtttagaaaatgatggtaggtttatttcttgaattttcagaaattcaagcttaaagcatcacgtttctctaatattgtgtggtgctttctgtcattttacttttttaacatttatatggaatagcaaccatcagccttctctttcagatgtgccgtttgggggtgctaaagctggtgttaagatcaatcccaagaactatactgtaagtatgaaagtgatatttgttttttattgttgttgttgtttttgtttttctgagacagagtcttcctctgttgttcaggccggagtacaatggcgcaatcttggctcactgcaacctccgcctcccgggttcaagcagttctccttgatccagtaactgggattacaggtgcacgccaccatgcccgactaatttttgtatttttagtagagaggggatttcaccatgttggccaggctgttcttgaactcctgacctcaggtgatccacctgccttggcctcccagagtgctaggattgcaggcatgagccaccgcacccggcctcaaagtgacatttgtgcacacagtgcatttatgaaggacttgaaattactgggcttctctgtatcccccactatcagtgagatcagtagtccccattgcttttcaaatggaatagaaaaatgtaaagaattaactcatagcgtgttttgccatataaagatcacctacttaatatctatatcctttatcattttctgtttcatttggttttgtttttatgagtcttttgttttacttttttgctttttgttttattattttcttacttagttaaaacgtaattaatatcttcacttatatacttatacccatatttatataatgtcttcacttagacacttatacccatatttaagaaatactgtgatctgattagccaggcatagtggtgcacacctgtaatcccagctactcgggaggctcaggcatgagaattgcttgaacccaggaggcagaggttggctgagatttcaccactgcattccagcctgggtaacagagcaagactctgtctcaaaaagaaaaaagtattactgtgatctgaagtttttatgtcaggatctgattctagtgacacatatcttaactaagactataaaaaccttactttttatccagtcagttccaagttaattcaaactgattgtcacaatgctttacataatactaaattatctatatacaaacataaatgcatgatttttattctctttaaaattcaccatttaaatggaatataattatatttarrttaaycttaattaagatttagtgtatttttcagtggggaattaatagaatgggaatttgagccctagttctactatcttgtttttataacctacttttttgatcccttattttgtcacctttaaaatggcaatgcctactttatgagttgttctaaggattacatgagaagacatatgaaaatgtactataaatagaaaataagatgctagctataatctcaagcgatttttatatcaattttttcttttgtttttgttttcttattttacaggataatgaattggaaaagatcacaaggaggttcaccatggagctagcaaaaaagggctttattggtatgtgtagccacatagtttttggtataaagtgggaacatctaaaaatttttttttttttttgagacggagtctcactctgttgcccagactagagtgcagtggtgcgatctcgtccgcctcctgggttcaagcaattctcttgtctcagcctcccaagtagctgagattacaggcatgtgccaccacacccagctgatttttgtatttttactggagatggggytttgccatgttggtcaggctgggcttgaactcctgacatcaggtgatccacccatctcggactcccaaactgctggtattacagataggagccactgtgcccggcctcctactatttgttataggagcttttgccaaacatacaacatttctgaagatattaatctttgtttgcttgatgtttttgtatcttactattatctgtgtttatattttctttgtgcacaatctgaatattctttttatgatatgtaagtatttgtcatgtaccctttaattttcaagcagtttaaacctatattttttttaatctagaaggcttctaatttgtttgaatagaatatgcataactacttaatagaatgcttgccctatcagtatagttaatagaatgttaatacttactgccgagcgtggtggctcacacctgtaatcccagcactttgagaggccgaggcaggtggatcacgaggtcagatcgagaccattctggctaacggggtttagtaggaatcccatctctactaaaaacacaaaaaatttgccaggcgtggtcgcgagtgcctgtagtcccagctactcaggaggctgagacaggagaatggtgtgaacctgggaagcagagcttccagtgagccaagatcacgccactacaccccagcctgggcaacagagcgagactccgtctcaaaaaaaaaaaaaaaaaaaaaaaaagaatgttaattgttacttaataatagaatacttgtcctatcaatatcagtatagttaaacaaaataaggtctacttaaatagaaaataaagtgtatttttctctactttcctttcttagcatttcccccacaagttcccatgaaattaaactataaaggctgggcatggtggctggtgcttgtaatcccagcatttttggaggctgaggtgggaggatcacttgagcccagaagttcgagaccaccctgggcaatattacaagaccccatctctacaaaaaatgaaaacattatccaagcgtgatggtgcatgcctgtggtcccaactactaagatgggaggatcccttaagcctggggggttgaggctgcagtgagctatgattgtgccactgcactctggcctgccacactctggcctgagcaacaaaacgagaccacatctcaagaagaaagagaaatgaaataaagctattcggattcatttttaggaaaaaaaagtcatgaaataaatgtcatgaaataacctaatatagaaatacagtaagtataggtaactctaaaacttgactagatttggcctgtctttgataataaaaggcatttgggcctttgatgtgccrcatacccagcactactgtgaacttgtgcatccttacatggagtctgttaacgtaagttaatatgagttaactatctcgctcacacttttataggagtgcctactgattctgagatatggtgaattgaagtcatcttcagcctgttaatagccttcataatttttaaaaggtctttcctcttcccctaaatctcaaacacattttatagtcttgaatggtttcagactttattcagtcatatttrtcacccatatctgcaatatctccagcttaattttatcagacttgacaagtacctaataattccaaaggtcaaaaagtgattcattggaatactgaaagaaaacacagcttaaaytctagtaatttgatttatttgcttaatgtgcaaaagcctcattgacccaggatgcagttaaattgacgtcttggcccagaaagctttgaagcctaggaggtaggcaaagggagttttttctctcactcctcggcaaaccttcaaatttgatgttattwatctgttatttcctgactgcccattccacagagagtgtcagattgaggctcagacctgagcctgaaccctgatcctgtcacatgtgtgtttagcatcagcttgtaaatttctgcaaaacaaaagaaaaaaagaggctgggatttttataggaatttcattgaatctgtacactaatttgtggagtattgccatcttccccaccctccccaaaaagrttttgtcctttcacccaggctggagtaccagacagcagtcactgcaaccttgacctcctgggctcaagcaatcctctcacctcaccctcccaagtagctagaaccacaggggtgtgcaactgtgcctagctaattttttaattttttgtggagacacggtctcatcacgtatcccagactggtctcaaactcctgagctcaagcagtcttcccacctcagcttcccaaaattctgggattataggcatgagccactgcacctgaccagtattgccatcttaaccatattaagccttccaatgctgaatatgagatgtctttccatttatttaggtctcttgatttctttcaatgatgttttgtagttctcattgtagaagtcttacatagaagtcttacaactaaatattttactccttttaatgctattgtaagtgacattggtctatagttttcttatgatgtctttgtctagtctttgtatcaggacaattctagcctcatggaatgagttgaggagtgttccttcctcttctgcttttggaaaagcttttgaaaggtcaatgttcattctcttgtgtgagtgtaaatatcacctaagttctgcaggaccctgatgtctccacccttctcatccccttatatctctgtgtaccaaaattaccctttcatctcctactctatagtcacatgctgttagaaaagttgcttttttaaaaaagattaacttctgcctcatacctgttctctatataagaatttatctgttaggccaagcatggtggctcatgcctgtaatcccagcactttgggaggctgaggcgggtggatcacctgaggtcaggagttcgagaccagcctggccaacatggtaaaaccccgtctctactaaaaataaaaaaaaattagccaggcaggtacctgtaatcccagctactcaggaggctgaggcaggagaattgcttgaacctggaaggcggaggttgcagtgagccgagatcatgccattgtactccagcctgggcagcaagagtgtaactccttctcaaaacataaaaattaaaaaaaaacaaaaagaatatatctgttattcaggaactacttgttttttgtttttgtttttgttttgagacagagtcttgctgtgtcacccaggctggagtgtagtggcacgatctcagctcactgcaagctccgcctcccgggttcacgccattctcctgcctcagcctcccaagaagctgggactacaggcgcccgccaccacgcccggctaattttttgtatttttagtagagacagggtttcactgtgttagccaggatggtctcgatctcctgaccttgtgatccactcacctcggcctcccaaagtgctaggattacaggcatgagcaccgcacccggcctcaggaactacttgtaatctgtgcatccctatacattagttttgtatggagtagaaaactcataagcctaataactaataccttgtgattttgttttggatggcagaagctgtttcacgtttagcatgtatagactgtttttgagaaggattttatcattacgtgtttctgatttacaaaccatgtgtttcagacttgccacttgccagagcccttctccaattggaattgttttttgtttttttgattttgagacagagtctcgctctgtcaccaggctggagctcagtggcgtgatctcggctcactgcaacgtctgcctccctggttcaagcaattctcctgcctcagcctcccgagtagctgggactatgggcatgtgcctccacccccagctaatttttgtatttttagtagagacggggttttaccacgttggccaggatggtctctctctcttgacctcgtgatcagcccacctcggcctcccaaagtgctgggattacaggcgtgagccaccgcgcccagccggttttttgttttttaaatgtattgtttaatcaagacaggatctcactatgttgcccaggcttgtctcaaattcctggactcaagccatcctcctgcctcggcctcccaaagtgctgggattacaggcataagccactgccccggcctagttggaattgttgtttgaggtaacaagcttatttaatcctaaagcaagcataatmcttttgtagttacctctagaaagattcaggaccaatttgtcatttgtacattgggagaaaaggagtggttaaacaaagttgtgctgacctccagcagaggtatgtcactaaaggaatggaaagtgagcaaataggagctggagagcgccagagagcccttttgtcagtggatgaggctagaatatggcattaatctttccaagtgcagtggggattagacttcacaagattttgttgttgttgttgttgttgttgtcattgacttcatgagatttttaaggtgactaagggaagggtgctaagacatagagttacagattaggtgggaggtggagagggtcagggtataaaaagcgatccttgaccatttcaaagttatcttatactagccctgtatccattacatcacagcttgttcaaaaaagtttattatttaggccttgggcccctgagttatagaaaaacattacaatatactgattctgttgactaaaaagtaaaatttataggaataattgggtacagcccttagaaagaactttaattattttatggggagacataatagtttaatagtttaactttttttttttttttttttgaaacagagtcttactctgtcgcccaggctagagtgcactggcgcgatcttggctcactgcaacacccccsacctccattcaagcgattctcctgcctcagcctccggagtagctgggattacagacatgtgccaccacgcccrgctaatttttgtatttttagtaaaggcagggtttcaccatgttggtcaggctggtctcaaactcctgacctcgtgatccgccctcctcagcctcccaaggtgctgggattacaggcatgcgccactgtgctcagcctaatagtttaaccattttttaagttgcgtttttcgttttgtaaaaacgagtttgtattttacagttgaaataatatagaaagttataaactatatatatggcagggaagagaaaaaaattataagtgggaacatgttatacatgctgtatgaaacctgcctttttccatatgtatgttcatgataattccaagtaatttacatrgatataagttaccctttttaatggctgtttagtactttgcataggtataccatatttcatttaattggcatacaagataattaggttgtttttatttttactgtgtttgagaggagtatttctgcacctttacagatttgagtgagcatcacttaacatgtttttatcagagatcttactgtagcmgtcagtagtagtatagtcagtgattcctgytatkgcctgtaagctaatttattagcctaaacctttaatttcctatgatctgaggaactgaaagctaaggcctaaaaccttatatgtgctgaatgtcgaataataggtcacagccacattcttccacaagtaaaaataatatggggcttaacacaattgctttagcaatatgaccttctcccctttttctctacttgataaggagggcttatacccccactaagcagcatgttactctgctatctcatacatgtcaactccctaaccataataatcctgcttatatagaacacaatggtactgttatctctaattgcatgttagtgaaatgaggtcaagagaggctaaactgattaacctctggtcgcacactcagaaatcctatggagtggcttatatctgtygtgcatagctaacttccaaacatacagcaagtaaatgccagagggagaaattattatgtaatgttgtatgtgtctgcattttatagtgaaacatttaatgaatatttctatgactttrattagctacctaaatgagatctaaagttttctagccatggtaacttggttattacagagacttacaaggatctttgtgttcgagaagaatttttcttaaaaactggtgcactcctctttccctgtgcccccgcaggtcctggcattgatgtgcctgctccagacatgagcacaggtgagcgggagatgtcctggatcgctgatacctatgccagcaccatagggcactatgtgagtacccactggaagccccgaggcttctgcatttgctgtctacaagaattaacagtttgactgattatatcaaaagttgagaatccctgggtttttctctcattcaatcataatcttgatgtgcatattattttatgtctacttgtctattcttaaatcgtaatgaacacagattgagctttacttatatgctgccctatacttgtcactggaacaggaccagggcagcccactgtgctaagacactagaacgtacatcaagaagcatccaattctgatttttccctcagagggcttccatttaaagaggaactaaggtgcataagcagataaggtatggaaataatgtaatacaacagtggagattatgaattctgaaataagactttctagaggagatatttgggctagaccttgaaartgggtagaatatgaacatttagagatttggaggataagaggaagagaaacaatagcgttcagtttgtctgaaggtaaggcatatttataaaggtaatagaaagtaagagtgagggctggatgcagtggctcattcccataatyccagcactttgggtggccaaggcaggtggatcacttgagcccaggagttcgagaccagcctggacaacatggggaaaccctgtctttccaaaaaatacaaaaattagccaagcgtggtggtatacacctataatcccagctacctgggaggcaygcttgagcccaggaggttgaggctgcagtgagctgtggttgcaccacagcactccagcctgggcartagagtgagaccctgtctcaaaacaaaaaaaaagtaagaatgaagaggtaaatgaaccaggacaaaaacaccaagccccagtgtttgtgttttacatggtagtcagtggagaaattttgctgatccttcctggggaagaataggctggcagcagtgtccagctgtgctggcgccaggagagaacctcctatggtgtcagtgcctttccaccaagtccaggagccagaggaccaggagaggagcattgcacatgtgaggcacatgacagagagactcagcaaaactggattggatatatgtggaattaaggaaagggaccaggctgagtcacagagaaccaggagaacctgagtctggggactgagcagaggtagtaccacagaactgaacatgagaggaaacttaactcctgtccctgaaaggggtgcaaccttaaaaaatgaaacatttcaggagtaggaagagaaacagagtcaaaaaatacatttatgcctactacatgcagggccatgtgtaagcaaggtattcactacaattgggataaattgctagaagttgttttgaagctatgaaaaagaatcacaggcccatccagtcctttcagtcctttcaaggtaaggtcagaaaaagcctcctaggagataaaaccttctggtctgcacttagacgggtgtgtggacatggactagggtaggggtagtggcaagtgtttggaacagaaggaattacctgagggaaggttctgaagttcagaagctgggtgaacttgggaggataaggactgactactgtggccagagttgagaaagagaaaggtgggataagaaaggccagtagaaaaaagggtcaggccaggttactgcttggtaggtgaccatgagaactttggtctttgtcctgaaaacacagggaaacagcaaagagctggtttcaagcaggtgtgactcagctaagtgtgcatttgaagacttgagggcaggagactactacaggggcccggactgcaaggggatatgaagagggaagcagggcatgaaatatagcctccaactaagaaaaatggcaccggagagaagcagaaagaagacagcttgaaaagtggctgttacccagagaaaaaggttttttttgtcttttggcatgtttattggctgtaagacacagatttaccggtgcaagagatagacaatgctgaagagatgcaggctggtagaggtagtgaagtcccccaggggaatgaaggcctggggaattcttttcatagtgaaaagatgggccttggagaagaggaagaatgtggaaatggggacatttcctgaagtgatgtcatgctgtggctgggaacatgggcagaccacctgaagtccaaccctggcaccttcacccatcagtgctgtgacttgggagtctctgtgcctccatttcctcctatgcaaaatgacagtagtaatagtacctactttgtgagactcatgagcattagatgaataataatctaatgcacctagaactgtacatagcccttagtaagtatcagaaaataaatatctgtaggtattacatcaggtaaattatacaaccccctgaaataaaacaggaacgatatagacccttcaaataattgtggtttcaactgcccttcccaaaaggacagttttccacctgtcacctttttatgcatccttcccttagcccttgattttagatttcttatcacttgaaggaaaactgttcaccagtatagttcaaggggccgtgcttcacaggactttctcttgctgttagcactgagaatgagctacaaataacatactgcccattggtttgcactattcaatatagtgtcttgcttaaaaagaacaagagaccagctgggcatagtggctcacgcctgtaatcccagcactttgggaggcggaagcaggtggatcacctgagatcaggagctcatttagcaatgagctctgggtgtggtatttttttttttttttttttttttttttgagacggagtctcactctgtcacccgatctcaggtcaccgcaacctccgcctcccgggttcaagcaattctcctgcctcagcctcccaagtagctgggattacaggtgcctgccaccatgcccagctaatttttttgtatttttagtagagacggtgtttcaccatgttgaccaggctggactcaggtgaagcaactatactggtgaacagttttccctctttaagtgataagaaatctaaaatcaagccctaaaggaaggacacagttgtttttgttactcatttctagatgtgaactgaaacgtgccgccctctttgtcctagccccacctagaagtgcagtgtaggtgggagaatgtattcttctctgggctttcaggaccattacgtatgctggggagcctggcagttggcgccaggcctgaccccagacagtatttccttcagctccagcatttgcattctcactgtttaaaagcatttggcactcggtttgcatttctgtattcataagtgttaattattcatgaaagcaaactgtgggaaaactactaattctattaatcactctactagactgagtttttcttccttgctttcatcctttttgttggtaattacacaaataatataattctaagttctctgtgtaaaaatatttaaacaatacagataaagaacagatcactttttaattcagccagctggaatgttagggatatgttgggagttaggggtttggtgtgaagtagggcattttattttgtttacatggaaagcaaattgcttcaacaaatttattattttatacttttgccactgacttaaaattttatatgaattttcattttatattgattgcctatacaaaataagactgtctctagtttctcctgctccaccgatgagtttactctgcagtgttctcgtggccgtgcttatagtatagttgatgtcttggaagggaagccctacttagcccaattcttcttttttctaattacacctgtttctgtttctgaacaagaatatacacacatcttcaattgaaagaggacaggccaggcgcggtggctcacgcctgtaatcccagcactttgggaggccgaggcgggtggatcacgaggtcaggagatcgagaccatcctgactaacacaggatgttactctctactaaaaatactctactctactaaataccccatctctactaaaaatacaaaaaaattagccgggcgtgatggtgggtgcctgtagtcccagctatcgggaggctgaggcaggagaatggcgtgaacccgggagatggagcttgcagtgagccgaaattgcgccactgcactccagcctgggtgacagagcgagactccgtctcaaaaaaaaaaaagacaaagaaagaggacagaaagatggatggtgaagactgttaacccccatctccactttgcagagctaaccactgctaccaaagatactctgctcacacagaagcacaggactcttacccacacatacctttttaaaaatacttcattaaatactttcgttactctactcttagatgaacttgaatgtcatgttatattaagtatcaagttatattaaaaacttcctttttcaaaagtggcagaatacaacattgagtcttcccatccaagacaattgtaaagcctcttcctgtctcaggctctgttttggtgacatgctcaagtcttatagtagattttaagacactcatgaatgggatgtgtatgtaccttgatttagtagtgcttaaatacttgttgaaggaatgatagctttaggctgagctagctctacttttgtgatgttatttgtacttacttgatgttcaatccctacactcttgttttttctgtcagaaaatatggtctactttgccgggcgtggtggctcacgcttgtaattctagcactttgggaggccaaggcagggagatcacttgaggtcaggagtttgagaccagcctgaccaacatggagaaaccccatctctactaaaaacacaaaattagccgggcgtggtggcacgtgcctggaataccagctactcaggaggctgaggcaggagaatcgcttgaacctgggaggtggaggttgcgatgagccaagatctcaccattgcactccagcctgagcaacaagagtgaaactccgtctcaaaaacaaacaaacaaacaaaaaaaaaaaaacagaaaatatagtatattttattgtattttctaggaacagaaagctgaaaaagtgagtcttgtctctattggtaaaagtataccttaaatacattcatacacacactcctaattagcatatttttgattaaatgagaatgtgctttgactttaattcattatgttccttcaacagagaaattggacttgacatttcattctttcaattaccccctcttacaggatattaatgcacacgcctgtgttactggtaaacccatcagccaagggggaatccatggacgcatctctgctactggccgtggtgtcttccatgggattgaaaatttcatcaatgaagcttcttacatgagcattttaggaatgacaccagggtttggagataaaacatttgttgttcaggtaaaaacaaaaacaaaaaaagtttccttaataactgatagacattaagtaaagttttcaatgtttttagaattgtaattttaaaattaagttatctcaaatctcttaaattttagagtggtggttttcagagtaatagatattttgttttttgaaccttggtatgattcatgtaactagaactgatttaagtatctctcaagtacatgtgaaactgttaccaacttcaaccaaactatcaccaaattcaaccaaaatattggttagtattcaaacttgaaattatagctagaagggcaagtctcttaacataattttctaagttttgtaagtatatagaaaggtttacacactgacccaaatttgtttcatgtgttaacatgtattttacttaggagaatcttaattaagttgaaattacttgaaaatagaagtggtggctggacacagtggctcatgcctgtattcccagcactttgggaggccaagacgggtggatcacttgaggccaggagttcgagaccagcctggccaacatggtgaaaccctgtctctactaaaagtagaaaaattaagccgggcgtggtggctcacgcctgtaatcccatcactttgggaggccaaggtgggcagatcacgaggtcaagagatcaagaccatcctggccaacatggtgaaacccggtctccgctaaaaataggaaaattagcrgggtgtggtggtacacgcctgtagtcccagctactctggaggctgacgcaggagaatcacttgaacccgggaggtggagcttgcagtgagccgagattgcgccactgcactccagcctgggtgacagagccagactctgtctcaaaaaaaaagaaagaaaaattagctgggcatgatggcggcacctgtaatcccaactactcaggagactaaggcaggagactcacttgaacccgggaggcagaggctgcagtgagccaagattgtgccattgcactccagcctgtgtgagagaatgagactcggtctcaaaaaaaaaaaaaaattgtatttctccaaattagtgacatcccttttcacaacataggacatctgatcatcaaggactgaggacctggtggtgtacttaacaccactgccatttattgattgattgagatggagtctcaccctattgcccaggctggagtgcagtctcggctcactgcaacctccacctcccaggttcaagtgattctcctacctcattctcccaagtagctgggattacaggcacggaccccatgcctaatttttgtatttttagtagagacggggtttcaccatgttggccatggctgatctcgaactcctgacctcaagtgatccacctgcctcagcctcccaaagtgctggaattacaagcgtgagccaccatgcccgctcatcacattcttaaacagagaattttattgttgaagagaaaccagttagtacattgtttcttttggcaaaagaattttgagaattgcttctaaataaacagagtatggatttacattggtcaaaatatgactcttgctgtctataccaggactttaatttttgtgttatgggtaattgttcttcacagggatttggtaatgtgggcctacactctatgagatatttacatcgttttggtgctaaatgtattgctgttggtgagtctgatgggagtatatggaatccagatggtattgacccaaaggaactggaagacttcaaattggtattaatacatttttatagcatagacactaaatataaatatttaaaactctggtgcagctattaattgtgattttcaatcaatggcagcaacatgggtccattctgggcttccccaaggcaaagccctatgaaggaagcatcttggaggccgactgtgacatactgatcccagctgccagtgagaagcagttgaccaaatccaacgcacccagagtcaaagccaaggtgacaacattatagaaaccagaaccaacattatcaatgtgaatgacgttaggggggtcatagaagagtctgattgagttttctctttctttttagcagctttattggcacatactgcacataccatacagttcccccatttaaggtacataatttaatggcttttagctaccggcacagagttgtgcaaccattaccaaaacaaacgcatctgcctgacactcctgtaaaaaaaaaaaacaagcaaacaaaaaaaaaacctagataaatagaaaagtgaaaggtagttttatacacttggcagagaaaaataacctctatttaactttaactgaaactgtgcttctccccacagccccttgttcatatatgcacatctcttgccctcagtggaggggatttgacggtggtgttcgcatttctctatgttcctgactctcttgcagatcattgctgaaggtgccaatgggccaacaactccagaagctgacaagatcttcctggagagaaacattatggttattccagtaagtcatctatatttattaggctttatatgtacttagaatcataatagtcttttgcaaggaatttggaggaagagaggaattattagtctccaagctctagtgaattcatctttttcacttttgagaaaatatagtagaagcatggttaattctaagcctgttaattttcactttgatcgaaacatttattccaatttcaggctctttactgaatgtctttagccttctaagagtctggttatataaatgtgtactgtgttagaaacactattctaactaaagctcttaagattttctatatgattcctaaccttatgcatttcaagtgccctttccagctttactcagaaaactaatatgaggaacacgtgctcaggttttttagcaagtaaaaatgagtctacaccaaaaagttactagaaattaatgtgggcttggaatatattttaaagaaccccctttgctgaaagcacttaagacatttaatgtaactgaaatgggctacccttaggtaataggagaaagaatcctgtcttctgagaggccctgtggacagtccagtccaactggttggtgggcaagccatttagtctgagaactaacttctggtagagaagaggctctaaccaaagattattaactttccttgattaataagccaaaaaatgatttttttttttcctaaatagaaaaagccttagatggaattgggtgggatgggaaggagtgttaattaagtgtgaaattcctgatactggctaaaatatatttgcgatatttraagtccagtctaccttggtattgaaattaaggtcttaggttcattttcagcttttacgaaaaccatcatcttctaatttctttgtcttatttttgtgcataggatctctacttgaatgctggaggagtgacagtatcttactttgagtggctgaagaatctaaatcatgtcagctatggccgtttgaccttcaaatatgaaagggattctaactaccacttgctcagtgagtatcgataatcttgttcgccaaaactcatcttttgagccagctgaaaggctgtaaaaaggtccacttaagagaactgatccctttgggaaagaattgagtctcagaaaagaaaataatattttgtctcatgaaacttagaccaaaaatgcacaatgtctttctggatattaactctcccatrtattatatccagagttttattctgtgatgtaatattcacagaatataatctacattttttttttctttttttgagagggagtctcgctccgtcgccgaggctggagtgcagtggcacgaactcggcttactgtagcctccgcctcccaggttcaagcaattctcctgcctcaccctcccaagtagctggggctacaggcactcaccgccacgcccggctaatttttgtatttttaatagagacggggtttcaccatgttggccaggatagccttgatctcctgacctcatgatcygcctgcctcagcctcccaaagtgctgggattacaggcgtgagccactgtgcccagccaataatatttttttaagtgtgattttaaaactccactgtcgatactaatttctgtctctggttgctcttagtaaaggcctatctagtgtcaagaattgtttttgagactcctgatgagaatacttgtttttctttgactagagtaagctccacagttaagagtagaatttctcatctagttgaaataagaccaagacctcctactgagcttctgtactcagcccactgtgagaatctgggtgaagtgttccatctatttccttttctttttcccccagcgttttctttttaatagagccaaggaaaaaccctggtaatgggtgttatggaaacagagcagtgacctaaattcacatttatataggaaattggcaatgtgttttattccttcctgactgagttttaaatgattaacccttttatgtcattaaaactctgtataaggccaggcgcagtggctcacgcctgtaatcccagcactttgggaggccaaggcagatgaatcacgaggtcaggaggtcgagaccatcctggctaacacggtgaaaccccgtctctactaaaaatacaaaaaattagctgggcgtggtggcgcgcacctgtagtcccagctactcgcaaggctgaggcaggagaatggcgtgaacccgggaggcagagtttgcagtgagctgagatcacgcctctacactccagcctgggtgacagaccacgactctgtctgtataagtttttgggttacagttatagtttgggactacttttgattctacttttttttttttttttctgttagcaatatcttgatctcttgttatttttttgtagtgtctgttcaagagagtttagaaagaaaatttggaaagcatggtggaactattcccattgtacccacggcagagttccaagacaggatatcggtgagtgtggtgaccccacagttgtacttcacacatgctccctgctctttccttcagacagagctggttagatggatttcatctgcggcatagtctttgtaattagcttgacagtaagtgcgtgacatgtgtgttttgtacctttccttttcattacattctaaaactggagtaagaatcctastgactactaacaaatataaaataaataaatttggtatttttcacgcacgtgttttaacagtgaaggattattatgtattttarttattttaagcttcagagaaataggaagaattgaaaagcaagcattagattgaactatatgggagtccaagagtttgagaccaacctggggaacatagtgagtccccatctctacaaaaataaagaaagaaacaagaggccaggcatggtggcacacgcctgtaatcccagcactttgggaggtcaaggcgggtggatcacgaagtcaagtcatcgacaccatcctggccaacatggtgaccccgtctctactaaaaatacaaaaattagccaggcgtggtgctacacgcctatagtcccagctacttgggaggctaaggcaggagaatcacttgaacccgggaggtggaggttgcagttagccgagattgcaccactgcactctagcctgagcaacagagagatactccgttcccgccgccgccacccccctccccccgccaaaaaaaagaaaggagggatggagggagggaaacttctttaccagtaaatgatggaagacaggaaaaacaaaagtccataacacataagcctgggggaaaaatttaacctcattgttaaagaaatacaaattgaaaaagagttttttttttttaatgtattaacaaaaacaatggatcttatgttctccatatatgtggtgaaacagttgtacctttattctagtgacggtgtagattggtgcagctctttggaaaatgtgaagttattaaagtgttcctgccctttggtgctatgacaatctcccctctgggaatttatcctaagaaaataattcaaaagaggaggaaccactccatgcacgatgatgttattgaaactatgtgtaggccaggtgcggtggctcacgcctataatcccagcactttgggaggccaaggcaggtggctcacctgagttcaggagttcaagaccagcctggccaacatggtgaaactccgtctctactaaaaatacaaaaaattagccaggcatggtggcacgcacctgtagtcccagctactcgggaggctgaggcaggagaatcgcttgaacccaggaggcagaggttggagtgagccaagaaatgcaccgctgcactccagcctgggcaacaagagcgaaactccatctcaaaaaaaaaaaaaaaaagaaacggtgtaaacagtttttaaatttggttttatttaaagtttaggagcagggaaatggctgacttatatcttataatacatcttaggtaatattcactcatagtttaagaatatattacaatgggtaaattatatcttctttttttttggtttttttttttttttttttttttttgagacagagtctcgatctgtcacccaggctggagtgcagtggtgcgattttggctcactgcaacctctgcctcccaggttcaagcaattctcctgccttagcctcctgagtagctgggattacaggcgcccgccaccacacccagctaatttttttgtatttttagtacagacggggtttcaccttgttggtcaggctggtctcaaacccctgacctcgtgatccacccgcctcggcctcccaaagtgctgggattacaggcgtgagccaccgcgcccggccgtcaatatatctccttatgaaatattcagtgatggaaaacagttctgagactatattgcaacatgggaaaaagttaaagattttgttgtaaagaaagaaaaaatgctttacccattctaggtactaaccgttcccctcagtaaacttcctatttcctagagtgatgtctttgttctggtccttttatctggaatacactgatctcctccctgcttaagtgtcactgcagttctgtggctctctctgaaagtctcctgtgtgccactgtttcgtacataacatccatcccaagtggctagcagtgcatcggaaggacttgcgctgctactgtccctgccagagggctgttcacccctccctttggtcaccccactgcccagcatatgccttgtcagttaaaaaaataaaagttttctcaagctctctccctctagtttccccctgcccctgtttggcactatcaggacccacatcatgaccctgccatgtttccactgtccctcatccccccagtgccctcacttccctccttatctaacttaaattccgtgctccatcattacagtcactccccagtcttgtttcctttgtcatactcctttgttaacacctaagccctgattaaatcccagcagccctgattaaatccctgattaaatcccgtgcctctaccctgtaggaggccctgctggcagttcacaccctgaccactaacctcaagtaggcgctcagagctgcccagcagtcatactgcttttccgtgtttcattcattctccccgtctcctgagtgattacatcacattttctcctcttctcactgccctgcattccagctcatgacctgctatctgttcacagataaaactgatgcagcctgggagcttccgcatctacccagctcctggtacctgtacccagtcctgtgtcatctctcttcgaatagatcagctctttgtgctttcatttcttaggtccakttcttgttgtgggcattggatggtttttcctcagatacactgctctagcaagtctgctcctctctcctacatcagcagtttccctctgagtcattcccctcagcttaccaaatgctgttttaaaaaatgtataaatcttaatcccacttccccttccagtattgccatttgtttcctgtagagcaaacctccttggaagagttgtatatactcagcctccaattcttctttacttgaacctactccaccaagactattcttgtcaagacagccagtgacaccagcattgccaaatccagtagctatttttcagtcctcatcttgcttgacctatcagcagttcttgttacaactgacactcccaccttgaaacattttcttctcttagcttccaggataccacattctcctggttttctccctacctcactaaacatttcttctcaattgcctcttgctggtatctcttcaactcttcactctcctaacattggaaggcctgcgtccctaaaccacttctctatctagattgaaaacttcaatgatccacttagccttgtggtttgaagtccatgtatatacactctcttcccactacaatataaagtctgtgagaacagaattttgattttattctctactatgtcccctagtacctggaagaktatgtactcagtaagtgtccaaactatatcagtgacccattttaagtttttatcgggcatatgtgttttgtagctctgtatgtcaccttaagagtggtagtgagttaattgtccttaattttttagaaagcattccaagaaacaaattaggaaagagagaaactgacttgatggtggaggccctgagtcatatcccagctctgaaaatagctatctgtaaccttggccatcttctctggtccttagtttcctcatcagtaaaattaaaacgctgctgagatctacacagctttaaaagttgctggcactactgaatagatacacagaattctaccccaaagccgctatggggtttaatcagattcctttctgtgttctgtgtggtgtccctgttctctggggagctgaggcgaacgcaccgtggcatgaacagtgtaacacattgctcagtgcatctgcgtctccatgagtggagggtgctcatctcactccatgccctcatgtctctaggtccaaaaactgtcttcattgttgtactataatcttatttcatgagtatttgtttgctgtcaaatataataaaaataaattgtgatcaacaagcaactgcttcagtaagtatcaagatactgtatctttgatactgtgcagaaatgacatatcttagctaaaagacaaaaaattctgtctggttgtatattgacttgagaatcctttgtcatcttatacagggacacaaagcaggtctttgtggttttgttaaacttgtgttcttttccctaatagggtgcatctgagaaagacatcgtgcactctggcttggcatacacaatggagcgttctgccagggtatgtgtgcagatgctgtttgccttccagctagtcacatgaagtgcaactcaaccatgctatctcagccgccagactgtatgtgctgatagaaaacatcaatctgttcaatggtcctcatttgtgtgtagcaaaacacatgttttttcagtctcagatgataagcaattttttagagtcttcaaatatgtttttgaggctttggaaagaaataataaggctgatttaggaggtaatgatgttggcagctagcccagtatggagtagttagccaaactggattgtagctccatgtgccactatgttatagctacgggagtctaccttactatagaatttggtataagcaaaasttattttgactgcttgatccctactttaaggcctcaaccacagtttgagtccagttttcctaatttcttcttgggttcagattctatctgcttggatttatgatgaaatagcataagcagatattggtgaagaaggtggtgcttcttagggctgttgtttttcttgttaatttttgatcgagatagggtgtatgtggtataaattcatcctttcaaagtattaaattcggcatcctttattatatatttgagccatcaccactttataattctagaacattttcatcactcccttttttttttttttttttttttttttgagacggagttttgccctgttgcccaggctagagtgcagtggcgcactttcagctcactgtaacctccacctcccaagttcaagcaattcttgtcccttagcctcccgagtagctgggattacaggcatgagccaccatgcccaactaatttttgattttgttttcattttgtttagttttttgagatggagtttcgctctgtcacccagctggagtgcaatggtgcaatctctgctcactgcaaccaccgcctcctggcttcaagcaattctccttcctcagtctcccgagtagccgggattacaggcgcccacccccacacccggttaattttttgtatttttaatagagatggggtttcaccatattggtcaggctggtctcgaactcctgacctcaagtgatccacctgcctcagcctcccaaagtgctgggattacaggtgtgagcaaccgcacccctgcctaatttttgtatttttagtagagacagggttttaccatgttggcaagtccggtcttgaactcctgagctcaagtgatctgcctacgtcggcctcccaaagtgctgggattacaggcgtgagccaccgcacccagccaccccattgttaagtccagagaattaggccctcctgcctagaggttctgctgctagagtagtttgtctttggctgcccaagtcctgccttgaaacaatgagagggtaacttggaccaggcctgtctgggccttgtgtgtttatggcctggccacttgagtcaggatcatcttcactgcattttctctttcatttcagcaaattatgcgcacagccatgaagtataacctgggattggacctgagaacagctgcctatgttaatgccattgagaaagtcttcaaagtgtacaatgaagctggtgtgaccttcacatagatggatcatggctgacttcctcactatcctcttcacatgtaacttctgcagacctatcacaagtttacatgtaaccacagaaatccctttctctcctgactcattaataatggataccattctcaacaagtcaatccaagtcagcccgttaaggagaaagaaattaaggttagcggatcatgtacaagctgagtgtgaaagtagaaatcacctacaccagagagccattttggtattttgcctttaaataaaaagcctcctttatctggctgtgcagccttgctctgtggcttttcccaacacaatcagtgctagtgctggggaggaacagtcaagagcagtcagttgcttgcttattttttctggatgagtctgggacacactktaactttaacacatttaagaagtaggtgtgtggccttttcagaaggtggcatggtcctcaagtgagttcttagtattttatatcagcaaaataattcaattttgcaggttgcaaacaaatataaaacctgtttctgtttatgaatattattcttttagaatagaawaagtacatgctgctgtaataaaattgcctttaatcacttaacaagcctaaccttgactcaaacagtgaatgcctatagaaataataaatgaaaaaaactagtatttttatatcataaaacaatgtcatttatagcttatcattcatgtattgtccagcagacattaaaagccctgtggataattaagttatcttcatacctgcaaaatggtggaggctattttcattaaaactgtcagaatttgcttactataattatgatacagtccaaagaatgcagtcactttttatcatgttaactaattgttctcttttgaagatctatggttgactaattaaacaataattcaagtagagtgtcccagaaaaaaaccacttgggctccctgtttggagtctggctggctytgagcattgccaatrgcccctactcacctgactttgtatcctctccttttaraggctttgcattytgcacccagcttcactaacagtgggctgaaaacatccttgggttgagtgtttcatttgggagttrtttggccagggccttttgaacagtagtgtccccatgaagtgctagataatatatgtgtaaragtcagctttttttttttttttaactctaacacccttcagaaatttctaactactttgtaactgcatggcttaacctggtgataaaagcagttattaaaagtctacgttttccaaaacttacgtttcttttctgtgtttttacatgtggtagtttctcttttcataagttataatactgcaattggatttctgaaatgtttatagcgaccacctgtataacatttccttccactttattgtgagctgcccagattttattcttgaattgttttttttttttttgttcggtgctttacacgttcagagaaacttcccgagtaacgaactatagaaatgatccctgaaagcatagtctttattctcgaattattttgtattttattaaataatatgaacagctgttcttgagaaagaggctctaatgttgaaagctgatagtgaagtaacttttagtgccgtttttcactaaaggggatttaatgtggaataatttagccacagaatgtaacaactattgaagagagaatactaactgtaatcagaactggattctagacttgattccaccagttacttaactgccagtgtgaagcctggctttcatttggtctttgtccgtatgtcacagttctgcctctgcatgctcctggcatagggtcagtcagataaacaggcccccagtatatgggcatagtgagcccttccccagcatggtggtgtctatctgcactctaggtgggctactaaaatgtgtaagggggaaagtgatacaaaaaccagttccagaatgttagaataatggtggggcagcagatttaagtcatgtgaatgtgggataagtcttagtggtggcctttgactatatattggaaatactgatttttttttggttggggggttggtttttgttttttgagacagtgtcttgctctgtcacccaggctggagtgcggtggtgcaatcacggctcactgcatcctctacctcctgggatcaagcagttactctacctcagcctcctgagtagctaggaccacatgtatgggtacgacacctggctaattgtttttatttttttgtagacacgaggtctccctatgttgcccaggctggtctcacactcctggactcaagtgatccttccaccttggcctcccaaagtactaggattacaggcatgagccaccatgcctggccaatggtaattttttaaagattaatgttgaggagtattgttgatagtaatattagaaaactaaattgcctgtgctagctatataaagatgagagcactagtgtcagtaattttggctcctgaaggttttagtttttaaaaatctggtcaattactctttttaccttgacagaaattttcttttttttttttttttttttttttttttgagacggagtctcgctctgtccccaaggctggagtgcagtagcgtgatctcggctcactgtaaccccccgccccctgggttcaagcaattctgctgccttagccttcctagcagctgggactacagatgcgtgccagcacgcccagctaattttctcgtattttgattagagatggagtttcaccatattggccaggctggtctcaaactcctgacctcatgatccacccaccttggcctcccaaagtgctgggattataggggtgagccactgtgcctgacctattttcaattatttttaaaactcacacacgatactcaagttacttgcttctgaaatagccatagatgacttatatagcacctgaagaagacttaactggtgctttatgagcctctacaccagtgtattctaatatccctgattaaggagatgagaagtaaaggcatgaattttcagtgcttttggcaccctaactagtaggattggtcattccttttttctatattttttctcttttcctttttttttttttttttactccatgactagccaaagagctgatttacttttttaaaaacgcttggcatggctgagcacggaggctcacgcctgtaatctcagcactttgggacgcccaggcaggcggatcacaaggtcaggagatggagaccatcctggctaacatggtgaaattccatctctactaaaaatacaaaaaaattacccgggcgtggtggcgggcgcctgtagtcccagctacttgggaggctgaggcaggagaatggcgtgaacccaggaggcggagcttgcagtgagccgagatygcgccactgcactccagcctgggccacagagtgagactgtctcaaaaaaaaagaaaagcctggcatgttaactcacaagcaaataaattccatattcactaaacatccctgacaggctttcccagccctgctgtttgttaaggtagtcaaagcatggcacatgaagaaaactacatctatggatattgtacaaaatattgtttttatgattttttaatatttttaacagacttttattgacttgtgtttgtatttttatcaaacatacttcatttatttatttattttgagacgaaatctcactctatcacccaggctggagtgcagtggtgtgatcttggcttaccgcaacctccgccttccaggttcaagcgattctcctgcttcagcctccggagtagctgggattacaggcatgcgccaccatgcccagcaaattttcgtattattagtagagacggggtttcaccatgttggccaggctggtctcgaactcctaacttcgggtgatccacctgcttcagcctcccaaagtgttggtattataggcatgagccaccacgtccagcctcaaacatacttcagtttttcacctcagcactgttgacattttaggctatgtaattctctgccttgtaggatgtttagtaatatccctggcctctacacattagatgtcaggaagaccccctcagttataacaatgacaaatatattcagattgccaaatgtcccctgtggaacaaattcatcccttgttatgaaccgtgatccagagagccaaatagtgatacaaggtttattgttcacaatagctcgtcccctccaatccagacaccacctgcctcaccattttccactgccccaaggcaaccactttcagcagtcttaaatgtttcatttttattctatttaaagcctttgctcatttttaaattgggttttgtccgcattattgagtggtaagggtgctttacatattccacagccagttgtggtagtataggcctatggtcccagctactcagaaggctgaggcaggaggatcacctgagcccagaagttcaacactagtctaggcaacatagcaagaccctatctctaaatgaatttttgaaatatatattctagataattgacctttatcatgcatatactttgcaaatatttcctctcaatctgttatctttgtgctttcttgatagtctcctttttaatcttgagaaaacataattaatttttcctctggttggtgtgctttagggtgtatgtaagaaaccattgcctaatctatagtcatgcagatagatatatccctatggttttttttttgttgttgttttttgttttttttttttttgagacggtctcgctctgtcctccaggctggagtgcagtggtgtgatctgacggctcatggctaagtgcagcctctacctcctaggctcaagcaatcctcccccttcagcctcccaagtagctgggactataggcccataccaccaccaagcacagctaatttctgtatttttggagagacaaggtcttgccatgttgcccaggccagtcttgaactcccaggctcaagcagtccgcccaccttggcctcccaaagtgctaggattacaggtgtgagccactgtgccctggcctagaaagatttttttaagaaatagtgaccaggccaggygcagtggctaacatggtgaaaccccatctttactaaaaataccaaaaattagcaggtgggcaaggtggtgggcgcctgtagtcccagctactggggaggctgaagcaggagaatggtgtgaacccaggaggcggagcttgcagtgagccgagatcccgccactgcactccagcctgggcaacagagcgagactccgtctctaaataaataaataaataaataaataaataataaaaatagtgaccaaaaatatcccacatttgatgggagttgtgaatctacacattcaagatgctcaacaaattcaaagcaggataaactaaaagagatccacactgaggcacattattatcaaattgtagaaagttaaagacaggaaagcagcaagaggtaagtgattcatcctgtacaagggatcttcagtaagattaacagttgcttatcagaaatcacggagtacagaaggcagtaggacacttcttcccctctctcccactgacagatgatatattaaaagttctgacagcaaaaagtcaaccaagaatcctatatctttcaaaaaaaaaaataacctctaaaaatgaaggaaactaagacagtcccagaaaagtcaagggagtttatcattagtaaacttgtgttataaagaatgctaaagtctcccccatgttactctcagggaagaaaaaaaaaagaatgcaaaagtggagctggggccaggcatggtggctcacgcctgtaatctcagcactttgggaggccaaggcaggtggatggagtttgagagcagcctggccaatatggtgaaaccccatttctactaaaaatacaaaaaaattacctaggcatggtggcgtgcacctgtagtcccagctgactgaggctgaggcacaagaatcgcttgagtccgggaggtggaagttgcagtgagctgagatggtgccactgcactccagcctggacaacagagcaagactccatctcaaaaaaaaaagggggggttgggggagctcagcatgggttcacrcttgtaatttcagcactttgggaggctgaagtgggatcacctgaggccaggagtccacaagcagcctgggtgacgtaaggagaccccatctatacaaaataaaaataattagccagacagggtagctcaggcctgtggtcctagctattcaggaggctgaggcgggatgattgcttgcagccagcagtttaagactagcctggacaacatagaccccatctctacaaaatataaatttaaaaaattaactggccatggtggtatgcatctgtagttccaactactcatgatgctcacttgagaccagaagttggaggttacagtgagctctgatcacaccactgcactccagcctggttgacagagcaagaacctgtcactaaacaaaaataataaatgaataaaaatataagagttcttggccaggcacagtggctcatgcctgtaataccagcactttgggaggctgatgtgggtagatcacctgaggtcaggagtttgaggccagcctggccaatatggtgaaaccctatctctactaaaaatacaaaaattagccatgtgtgatggcacgtgcctgtaatcccagctacatggaaggctgaggcaggagaatcacttgaatgtgggaggcagaggttgcagtgagtggagattgcaccactgcactccagcctgggcaacagagcaagactcgggctcaaaaaaaaaagctaaagtgagtccttcaggctaaaatgaaaggatacaagatagtaactcaaagctatatgaagaaataaagagcactggtaaatgcaactatgtcgctaaatataaaagctagtattactgtattttgggtatgctattcctctttgtgatttaaaaaatgcataaaggccgggcgcggtggctcaagtctgtaatcccagcactttgggaggccgaggcaggtggatcatgatgtcaggagattgagaccatcctggttaacatggtgaaaccctgtctctactaaaaatacaaaaaattagctgggcatggtagcgggtgcctgtaatcccagctactcaggaggctgaggcaggagaatggcatgaacccaggaggcggaacttgcagtgagccgagattgcgccactgcactccagcctgggcgacagagcgagactccttctcaaaaaaaaaaaatg

SEQ ID NO: 94411 - DNA, 30411 bp, Homo sapiens
  misc_feature (1)...(30411): n = A,T,C or G
tgacctcatgatccacctgtctcggcctcccaaagtgctgggattacaggcgtgagccaccgtgcccctcctcctttactttcttaataaacttgctttcaattcacattgcgggatcaccctgaattctttcttgtgcaagatccaagaaccctctcttggggtctggattgggacccctttcctgtaactatcatgccactgcactccagcctgggcaacagagcaaggccctgtctcaaaaagaaaaaaaaaaaagtaatatgacttaatgcattcattttggagggtaagtctctcaaaataggcctttcactgggggaaaatggtaaaaatactccctggtaattcaagaattggagactcctgagatgctgctcatattagctgaacacttatcaatacttcacttttttccatatatactcaaggaacaagtgccatttaaagtgtttcactccgctgtgctaggtgcaannnnnnnnnnnnnnnnnnnnnnnnnnnnnnnnnnnnnnnnnnnnnnnnnnnnnnnnnnnnnnnnnnnnnnnnnnnnnnnnnnnnnnnnnnnnnnnnnnnnnnnnnnnnnnnnnnnnnnnnnnnnnnnnnnnnnnnnnnnnnnnnnnnnnnnnnnnnnnnnnnnnnnnnnnnnnnnnnnnnnnnnnnnnnnnnnnnnnnnnnnnnnnnnnnnnnnnnnnnnnnnnnnnnnnnnnnnnnnnnnnnnnnnnnnnnnnnnnnnnnnnnnnnnnnnnnnnnnnnnnnnnnnnnnnnnnnnnnnnnnnnnnnnnnnnnnnnnnnnnnnnnnnnnnnnnnnnnnnnnnnnnnnnnnnnnnnnnnnnnnnnnnnnnnnnnnnnnnnnnnnnnnnnnnnnnnnnnnnnnnnnnnnnnnnnnnnnnnnnnnnnnnnnnnnnnnnnnnnnnnnnnnnnnnnnnnnnnnnnnnnnnnnnnnnnnnnnnnnnnnnnnnnnnnnnnnnnnnnnnnnnnnnnnnnnnnnnnnnnnnnnnnnnnnnnnnnnnnnnnnnnnnnnnnnnnnnnnnnnnnnnnnnnnnnnnnnnnnnnnnnnnnnnnnnnnnnnnnnnnnnnnnnnnnnnnnnnnnnnnnnnnnnnnnnnnnnnnnnnnnnnnnnnnnnnnnnnnnnnnnnnnnnnnnnnnnnnnnnnnnnnnnnnnnnnnnnnnnnnnnnnnnnnnnnnnnnnnnnnnnnnnnnnnnnnnnnnnnnnnnnnnnnnnnnnnnnnnnnnnnnnnnnnnnnnnnnnnnnnnnnnnnnnnnnnnnnnnnnnnnnnnnnnnnnnnnnnnnnnnnnnnnnnnnnnnnnnnnnnnnnnnnnnnnnnnnnnnnnnnnnnnnnnnnnnnnnnnnnnnnnnnnnnnnnnnnnnnnnnnnnnnnnnnnnnnnnnnnnnnnnnnnnnnnnnnnnnnnnnnnnnnnnnnnnnnnnnnnnnnnnnnnnnnnnnnnnnnnnnnnnnnnnnnnnnnnnnnnnnnnnnnnnnnnnnnnnnnnnnnnnnnnnnnnnnnnnnnnnnnnnnnnnnnnnnnnnnnnnnnnnnnnnnnnnnnnnnnnnnnnnnnnnnnnnnnnnnnnnnnnnnnnnnnnnnnnnnnnnnnnnnnnnnnnnnnnnnnnnnnnnnnnnnnnnnnnnnnnnnnnnnnnnnnnnnnnnnnnnnnnnnnnnnnnnnnnnnnnnnnnnnnnnnnnnnnnnnnnnnnnnnnnnnnnnnnnnnnnnnnnnnnnnnnnnnnnnnnnnnnnnnnnnnnnnnnnnnnnnnnnnnnnnnnnnnnnnnnnnnnnnnnnnnnnnnnnnnnnnnnnnnnnnnnnnnnnnnnnnnnnnnnnnnnnnnnnnnnnnnnnnnnnnnnnnnnnnnnnnnnnnnnnnnnnnnnnnnnnnnnnnnnnnnnnnnnnnnnnnnnnnnnnnnnnnnnnnnnnnnnnnnnnnnnnnnnnnnnnnnnnnnnnnnnnnnnnnnnnnnnnnnnnnnnnnnnnnnnnnnnnnnnnnnnnnnnnnnnnnnnnnnnnnnnnnnnnnnnnnnnnnnnnnnnnnnnnnnnnnnnnnnnnnnnnnnnnnnnnnnnnnnnnnnnnnnnnnnnnnnnnnnnnnnnnnnnnnnnnnnnnnnnnnnnnnnnnnnnnnnnnnnnnnnnnnnnnnnnnnnnnnnnnnnnnnnnnnnnnnnnnnnnnnnnnnnnnnnnnnnnnnnnnnnnnnnnnnnnnnnnnnnnnnnnnnnnnnnnnnnnnnnnnnnnnnnnnnnnnnnnnnnnnnnnnnnnnnnnnnnnnnnnnnnnnnnnnnnnnnnnnnnnnnnnnnnnnnnnnnnnnnnnnnnnnnnnnnnnnnnnnnnnnnnnnnnnnnnnnnnnnnnnnnnnnnnnnnnnnnnnnnnnnnnnnnnnnnnnnnnnnnnnnnnnnnnnnnnnnnnnnnnnnnnnnnnnnnnnnnnnnnnnnnnnnnnnnnnnnnnnnnnnnnnnnnnnnnnnnnnnnnnnnnnnnnnnnnnnnnnnnnnnnnnnnnnnnnnnnnnnnnnnnnnnnnnnnnnnnnnnnnnnnnnnnnnnnnnnnnnnnnnnnnnnnnnnnnnnnnnnnnnnnnnnnnnnnnnnnnnnnnnnnnnnnnnnnnnnnnnnnnnnnnnnnnnnnnnnnnnnnnnnnnnnnnnnnnnnnnnnnnnnnnnnnnnnnnnnnnnnnnnnnnnnnnnnnnnnnnnnnnnnnnnnnnnnnnnnnnnnnnnnnnnnnnnnnnnnnnnnnnnnnnnnnnnnnnnnnnnnnnnnnnnnnnnnnnnnnnnnnnnnnnnnnnnnnnnnnnnnnnnnnnnnnnnnnnnnnnnnnnnnnnnnnnnnnnnnnnnnnnnnnnnnnnnnnnnnnnnnnnnnnnnnnnnnnnnnnnnnnnnnnnnnnnnnnnnnnnnnnnnnnnnnnnnnnnnnnnnnnnnnnnnnnnnnnnnnnnnnnnnnnnnnnnnnnnnnnnnnnnnnnnnnnnnnnnnnnnnnnnnnnnnnnnnnnnnnnnnnnnnnnnnnnnnnnnnnnnnnnnnnnnnnnnnnnnnnnnnnnnnnnnnnnnnnnnnnnnnnnnnnnnnnnnnnnnnnnnnnnnnnnnnnnnnnnnnnnnnnnnnnnnnnnnnnnnnnnnnnnnnnnnnnnnnnnnnnnnnnnnnnnnnnnnnnnnnnnnnnnnnnnnnnnnnnnnnnnnnnnnnnnnnnnnnnnnnnnnnnnnnnnnnnnnnnnnnnnnnnnnnnnnnnnnnnnnnnnnnnnnnnnnnnnnnnnnnnnnnnnnnnnnnnnnnnnnnnntggcgactcctcaaggatctagaactagaaataccatttgacccagccatcctattgctgggtatatacccaaaggattataaatcatgccgctataaagacacatgtacacatatgtttattgcggcactattcacaatagcaaagacttggaaccaacccaaatgtccatcaatgatagactggattaagaaaacgtggcaattatacaccatggaatactatgcagccataaaaatggatgagttcatgtcctttgtaggaacatggatgaagctggaaaccatcattctgagcaaactatcgccaggacagaaaatcaaacaccgcatgttctcactcataggtgggaattgaacaatgagaacacttggacacagggtggggaacatcacaccctggggcttgtcatggggtgggggaagccgggagagatagcattaggagatatacctaatgtaaatgacgagttcatgggtgcagcacaccaacgtggcacatgtatacatatgtaacaaacctgcacattgtgcacatgtaccctagaacttaaagtataataaaaataaataaattgggctgatgaaccatattacagtaatccaatatttcgcttgtaaagtcctgaggtttacagaaggaaatcttttctaataacaagaagagtgaggcatgtgctttggtctttatttcctagttatacgatcctgggtaaggagctcaacttttctctgccaaaattaaatgaggattaaatgagatcatatatgtgaagttgtgaaagacagtgcctggcacatagtaggatcaatcaatgttaatatctctaaaatagagattgagtctgaagatccacaaagtggtagaactgatcttaagattcccaaatgatagaattgggctttatttgcctaagtagtatggtattacttattgtatgcccaggggatcttttttttttaaataatgtttatttatttattttgagacagagtctcgctctgtcccccaagctggagtgcagtggcaccattttggctcactgcaacctctacctacccggttcaagcaattctcctgcctcagcctcctgagtagctgggattacaggtgcgcaccaccatgcccagctaatttttgtatatttagtagagacagggttttgccatgctggccagactcgtcttaaactcctgacctaaggtgatccagctccctcagcctgccacagtgctgggattacaggtgtaagccacggcacccagccctaatgttttatttttttgtagagatgaggtcttactatgtggcccaggctggtcttgaattcctggacctaagtgatcctcccaccttgacctcccaaagtgttgggattacaggcatgagccaccgtgcccagttcccttcttaaatagtttaaagggggagaagaaagaaaaagacagattttcttcccttccactaccaaaacaggcaaaacacaccagaacactttgcttagcatttcttttcttttcttttctttttttgagaaagagtcttcctctgtcagccagggtggagtgcagtggggcgatcttggctcacttcaagctccacctcctgggttcaggccattctcctgcctcagcctcccgagtagctgggactacaggtgcccaccaccacgcccagctaattttttgtatttttagtagagacgggatttcaccgtgttagccaggatggtctggatctcctgacctcgtgatccgcccgccttggcctcccaaagtgctggtattacaggagtgagccaccgtgcccggccgtcccttcattttttaagataaattcacataccataaaacttaccattttattttctctctctttttctttctttctttcctttttttttttttttttttttttttttgcaggctggagtgcagtggccctatcgtggctcactgcaaccttgaattcctgggctcaagagatcctcccacctcagactcccaagtagcagtagctgagactatcagtgcgcaccaccaagtctgagtaattacaatacttttttctttttctttttcttttttttttcgtagagatggggtcttcctattttgtccaggctaatctggaactcctgccctcaaaggatcctcctgtctaattctctcaaagtgctgggattacaggcatgtgccaccgcacccggccaaatgcacctccttttttcaagtgtacaattcaatggtttttaatatattcacaaagtcatggaaccatcacacctatctaatttcaaaatgttttcatcactccaaaaaataaccccatatgggaggccgcggcgggcagatcactcgagaccagcctggccaacatattgaaaccccgtctccactaaaaatacaaaaattagtcgggcgtgayrgcgcacgcgtgtagtcccagctgctcgggaggctgaggcaggagaatcgcttgaacccgggaggcggaggttgcagtgagcccagatcgccccactgcactccagcctgggcgacagagcgagactccgtctcaaaaatatctaattaattaataaaaataaaataaataaataaataaataaccccatgccttctgcctctgtggctttgcctattctgggtattttgtgtcaacggacccatgcatgggggtgggccgggcacctttcaaacgttcagcccccacgacggcccgtggcctccggattggacggcacgagctgggtgtgcgcggggcgcccaaccgctcaggagctcctggaggaggcaggtgcaggtgccggctgctgcagcgcagtagctgctggaggctggcgaggcccggaggcggtgcaggaagcctccgaccacgcgggctcctgatcgcgggcgcccacagcgcggacatggcgggctggtggccggcgttgtcgcgcacggcccggcgccacccgtggcccaccaacgtgctgctctacgttgctcgagcaacgtagctctacgctctacgagcgtgccgtagctcgctcgtctccgccggggacgtgctgcagcaacggctgcagggccgctaggccgactggcgccagacgcggcgcgtggccacgttggtggtgaccttccacgccaacttcaactacgtgtggctgggcctgctggagcgcgcgctcccgggccgagcgccgcgcgccatgctggccaagttgctgtgcgaccaggtggtcggtgcgcccatcgcggtctcggccttctacgccggtgaggggccggggggggaacctggggggtgggaccagtattgggggactggaggcagggacttggggatcaagcggctggagggagggcgctgcaggagcctggggacccgggcaggagccggggctctgagaccggagctgcttcagaggcctgaagggccagggcaaaggctggaggctggggtgtttgattgcgagaagttgcaggaggcactggctggggagccgagaaattggggagccagaggtacagcaggtcaggaatttagaggactagggtcggggctcagactctggggttgggtgtaggccaaggctggaggtaggcagggctgcggaggtctttgccccctgaaaaaggcccacgggaaaataaaggagatcccagttcaaggccatagcagctgcaatgaccgtgaaccaatcgtgggacagggaaggaaccgacctrctgttcagaaaatccacgcctggggccccggggccaacacaggaacaaaatgcaaggggacccgtgaccctggggggcagagcaggtggaatctgaggttgggcctggatcttcagcaaattcatgcccaggggcctagtcctgctttggtaacaagattttcccctggggtctcacggaaaacatcaagggaccttggatccttgccatagaggactatatacctgtgagggttcagggaaccctctccttagaaaatccgacccgggcctggggtgtgggggacaggggcttgactgtggaaaccttctctactgcgtacaataagaacaatggaaatgttacctgaaaaataccggggttcattcccttaacgagtcacaaatgactccaccaagaggcgggttttgatcaatgggagttttacttggcacaagaaaggaagacactgggcatattctcccaagtagtgtgtcccccagagaaagagacaggagggttttatggggtgatggagaaaggagagggtgcatgattgcatgtagagtaggggtcccagtgagtcatgatgctagcgcataggttgcataggttatagtcatgaagctatagcttctcccggggtgaagactttagcatggtaatgaggagagttaacttgggttcatctgtaagtaacctggggtcatttaggagctgatttaaacaaacagggtgacctcattccacccagggctggggaagaacaggttgaggtcaggaggctgtaaaacaggctgatcactcaagttggttaaattcttgtaatctttggagatcctccatctgctcacaggagggtccctgtggcctctatcatcattgcaatttctatagccttgaaggggatggggtgggtaactggggagaaaatctctatgggtcttaagcctgacggggtcagtgggtcaggagaacagacagccggggagctagggcctcctgttttatcagaaggtctgtgcctggtcccggcgtgtgatttgcagactagatttgcaaacagcttcctagcaactgttaaagaagtcttgtacagcggtgaaggggtaggggaccagaatgctatttaatcctcaaaaaactagtgagattgttctctttttcttttcttcttcttcttcttcttcttcttttttttttttttttttttttttgagacagagtcttgttttattgcccagcctggagtgtgcagtggcctgatctcagctcattgaaacctccatcttcaggttcaagcgatcctcctgcctcagcctaccaagtagctggcattacagatgcacaccaccatgcccggctaatttttgcatttttaatggagacaaagtttcaccatgtttgccagggtcgtctcgaactcctgaactcaagtaatctgcccatcatggcctcccaaagtgctgggatcacagacgtgagccctcgcacctgagattgttcttattactctcatattacaaatgaggaaacaactagtgaaattagtgaaattgttctctttttcttttctttttttttttgggagacagagtctcgctttatcatcctggctggaatgtgcattggcccgatctcagctcactgcaacctccactttctgggttcaagtgatccttctgcctcagcttctcgagaagctgggattacaggcatgcgccaccacaccgagctaattttgtatttttagtagagacggggtttctccgtgttggtcaggctggtctcgaactcctgacctcaggtgatccgctcgcctcaacttcccaaagtgctgggattacaggcatgagccaccgtgcccagcccactagctttttttaaaagatagaaattaaaatttcaaaatgtccaaatgttcaacttttcacaaaatgtttggaaggtagagaaaagtaaccaatagacccactattgtaactggattgtttttgtgmattgttatagtttttgaaaaaataattgttctgctataacttttatattctgctattctcacatcatatttatcattcctttaaaattttctagttttagagtggagactatgttctttttttttttttttttttgagacagggtcttgctatgttgtccagactggagtgcagtggcatgatcacagctcactgtagcctccacctcccaggctcaagcaatcctcccacctcagcctcctgagtaactatgactacaggcacaccaccacacctggctaatttttgtattttttatagagatgaggttttgccctgttgcccaggctggtctcttaactcctggactcaagcaatctgcctgcctcggcctcccaaagtgctgggattacaggcttgagccacggcacctgtctatgttctcttttcactgtmggatcagagggtcatattgatggatgatagtgatggttactttgcattttggaatggtaaacttaaacatgaactgttatacagtactctactgaatcttttaaaattcttttggtgtttttgcaaataggtatgagcattctccagggaaaggatgacatatttttggacctgaaacagaaattctggaacacctatatggtaagacaggcgtttgaaaatgtaatcagtatctttttgtgtgtgtatatacacacacacacacacacacacacaatatacaatacaatatatatacatatacaatcagtaactttttgtgtatatatgtgtatatgtatatatatgtacatagatccacaaaaatatatactttctgtgtacatatttataaagatttaaaatgttttaattgacacatatatgtatgtattttcagaatacatgtgatgatttgatacatttgtataatcatatcaggattctttgtgtgtgtgtgtgtgtctatatatggatatatatatatgtatatatatttttttttaataaaattttttttgagacagggtctcattctgtcacccaggctggaatgcagtggcatggtcatggctcactgcagcctggacctcctgagctcaagcgatcctcccacctcatccttctgagtagctgagactacaggcatgtgccaccacacccagctaattatttttaaattttttgatagagacagagtctcactatgtagcacaggctggcctcaaactcctgtgctccagttattctcccacctcaacattaagtacatttttattaaactattcctaaattagagctccagtttggttggcagaagggtccaatattttgacagagaaatcttaaagttattttgatagatgtatgaggagaggctttaagagtgtctatacttctcatgaattggaaagaaatactttctctgggccgggcacggtggctcacgcctctaatcccaacacctgggaggctgaggcaggcagatcacttgatgtcaggagtttgaaaccagcctggccaatatggtgaaaccctgtctctactaaaaatacaaaaattagctgggcacggtggtgtatgtctgtaatcccagctactcagtaggctgaggcaggagaatcacttgaatctgaagacaggttgcagtgagccaagatctcaccactgcactccagcctgggcaacagagcaagactccatctcaaaaagaaaaaaagaaatgaaataatatctctgaattttagtccatgttctcaatgatttctgactttattatattaactcttattaatgatcacaatttattttgtaaattttgcagccaaagggacaatttattttgtaaatttgggattctatttgcaaaatagggatggtagactgtgagtggcttaatggaatcattcccacattcagagccaatgttttcaggtgagcattctgcggagtcctggtgaaaagaactttaacatcacaaaggtattgatagtgaaggagaaggtttccaagggttactccaaggttcaaaacaaatcagcggttttactgtttgctcggcacaaatatatatagtccagtccagtgcaaaatttaggccgggcacggtggctcacgcctgtaatcccaacactttgggaggtggaggcgggtggatcacaaggtcgggagatcgagaccatcctggctaacatggtgaaaccctgtctccactaaaaataaaaaaattagcagggcatggtggtacgagcctgtagttccagctacttgggaggctgaggcaggagaatcacttgaacccggaaggcggaggttgcactaagccgatatcacgccactgcactccagcctgggcgacagagcgagactctgtctcaaaaaaaaaaaaaaaaaaaaaaaaaaaagagcgggaagtagccggctcacacttgtaatcccagcattttgggaggctgaggcaagaggatcggtagagctcagcagtttcagaccagcctgcgcaacacagtgagaccccatctctacaaaaataaaataaattagctgggcatagtggcaagcgtctgttgtcccagctgctcaggaagctgagatgggaggattgcaagcctgggaggtcaaggctgcaataagctgtgattgcaccgctgcacaccagcctgagtgacagagtgaggccctggttcaaaaaaaaaaaaaaaagagcaggaagtagaattgggaaagaaagaagcttcaggcagggatttgtaaatgaacaaaaccacaggaatatttgcatactgttttaaaaaacagtggttacaatgagtgagtctcatctaccctcaggaaaagaaagagggtataccagcagtctaaagcccagcccatttggagattttttgggaagatttcttgtgataagaaattgtcggccgggcacgacaactcacacctgtaatcccagcactttggcaggcggatcactaggtcaagagattgagaccatcctggccaacttggtgaaaccccgtcactactaaaaatacaaaaattagccaggcatggtggcgggtgcctgtaatcccagctactcaggagactgaggcaggacaattgctggaacccgggaggcggaggttgcagtgagctgagatcgtgccactgcactccagcctggcaacagagggagactccgtcacaaaaagaaaaaaaaaaagaaaagaaaagaaactgtcttccaggtgctgtcctaggtgttagtggaagatacccaaaaaaccatataaaacagagattctgtcctaaagggacttagagtctagtgggatagatagataaatagacaagtcattaactagagttcgatgagaaatgctctcagagcccatgggtactcagcacagcgaggaggtgtgggagtggggatcaaggaagtcttgctggggccaggcaccagtggctcatgcctgtaatgctagcactttgggaggccaaggtgggtagattgcttgagctcaggaatttgagaccagcctgggcaatatgacgatgaaacctcatctccacaaatacaaaaatgagctggtcgtggtggctcacacctgtagtcccagctactcaggaggctgaggtgggaggatctcctgagcccaggaggtcaagactgcagtaagctatgattgtaccactgcactccagcctgggtaacacagcgagaccctgtctcaaaataaaaaataaaaaataaaaaaaaaagatctggagttaggcacatactgggggacaggtcattccaggggcagaagagctgagtagagttgacaatgtgtaaagcaccacggtatgcccagaggggagaaaccacaggcagtttggtgttcacagagtatttgttgagcaacttggaatgagtttggatcctggagactgttgaacacccggagctgaggatcttgcacttcacggttaggtaattgcagcagaggaaaccagagtggggggttattgtagccaagttcacataagaaataatgaagtacgtcgggtgtggtggctcatgcctgtaatcctaacactttgggagggtgaggcgagaggatcccttgaggttaggagttcgagaccagcttgggcaacatagcaagaccctgtctgtatttaaaaaaataaaactggcctggcatggtggctcacacctgtaatctcaccactttgagaggccgaggtgagcagatcacttgaggtcaggagttcgagaccagccagaccaaaatggtgaaacccagtctctactaaaaatacaaaaaattagccaggcatggtggcgcacgcctgtaatcccagctactcaagaggctgagtcaggagaattgtgggcggcaagccacccaggcaccgaggcaagagacagaggacacgatctgttccagtataataaaatataaaacaagaatagttataccagatatagatcttagatatgattatatatgaatatcattaatcattagtttgtagcaattactttttcttccaatattataataaccctcgctcaataatcatagcctaggaaaaaccaggccatacacagataggagctgaagggacatagtgaggtgtgaccggaagacaggagtgcgagccttctgttatgcctggacagggccaccagagggctccttggtctagcggtgacaccagcatctgggaagatgcccgttaccaggcggatcgtggtccagcggtctccctgtgatgctgtgcttcagtggtcacactcctagtccaccttcatgtttcatcctgtacacctgactctgccttctagatagcagtggtaaattagtgaaaatactaatagtccctgatatgcagaaataatggcataagctgtctttctctttgtctcctctccctctctgcctcggctgccaggcagggaagggccccctgtccagtggacacgtgacccacgtgaccttacctatcattggaggtgactcacattctttaccctaacccttcagccttgtatccaataaataacagcgcagcccgacgttcggggccactaccggtctctgcatattggtggtagtggtcacccgggcccagctgcctgtgttgcccaggcttcctgtgttggccgtgctgtcaccaaggtcacagcatcctgagaacatggttttctccttgactaacaaggcctcggggtctgtctcggggttggccttccaccgggtcagcgggatgatccggcgcaagctcacggtgtgtctcctggtggtagaggggcttgtgtcaacctgtggccgggtggggatgctccttcccagctggtaggctgcccccaggctccatgccctgccctggcctggacactcacgctttgccttcttcatcaatgtcatctacctcatacctgtggacaaaaggaggaaaatgcaggatgcagccaggggcacagtccctgtaggggagtgtggaggacaggggcagggcaaggacccggtgctccctgcacagccggccccgcccacagcacgctctgtggagtttttctcctgctgtgcagatgagaagcagagtggcagcccaggcaggtgcagtgaccagagagcagccctggggctgttggaggagcccctgggagcctccatctcccgagtgagcccagcaggactgtgacctgttcggccaggtgtcctacaggggctgctgggctcagctacagatgggcgagaccgcagcatagtgggcgcccagcgggaagaaccagggagggacaaagtgagtttgcaggtgctggagaggctctcttcttgatgtcggtgctgaaccagaagtgtgtttaaggagaatttcctaaaattcaaagagttccacgggagtcgcggctaggccggggcgcttcttcagcatctacctgctctaaggcctgaacccccgtcatcagggccacgtttatatggggttcactgtcagccctgcttgtcaggtccagcagcacaatggggaccacacaaaaggcagggcccaggcctggcgcggtggctcaagcctgtaaacccaacacattgggaggccaaagcggttggatcacttgaggtcaggagttcgagaccagcctgaccaacatggtgaaaccccgtctgtaatagaaatacaaaaattagtcgggcatggtggcacgtgcctgtaattacagctactcaaaaggctgaggcrggagaattgcttgaaagatggggcagggggcagcggcagaggttgcagtgagccaaatcgggccattgcactcctggtgagaccggaagggtctctgtgccaggaggaaggcttcctggaggaggcggaccccgctgggcacaagcctgatgagagggaagggcatgcctgtgacatgggtggggagtccagggtggggacgggactgtcacagaggaggagcatgacggggagacagtgccctgggaatcttggcggtggaactccggggaggagctggctggggcggaggtgatgatccaggatgcgggccagcgtaggggtcttggtgggcatgctggggtcggatggagcgcaggagggagaggaggggggacaggtgggtacctgggctggaggcgcggcctgaggtgggcaggtgcagggggcgtgacttcatttaggggcagggcctggggctaggctgaagccggcagtgaggaccccgctctcgggtggaattggaggggacccgcggttgggcgcggcagggctcacagggacacccccgttctcctccccagggagaaagtgctcgtcgtgcacggcttcccgcccgccgtggcaacccttcgggtaaggaaggagaccaggcggcggcaggcgggcaagggcttggggtccgcccccctgcctggagccgccctaactcctccgtatcctgccgctgttggagtgggcctggaaccccctccataggcgcgcctcctactcccgctgcaccccgacctccgccgggacctctatgcgccgcgccgcacgggcgatggccttcgggcctccccggccccagggcaccgcgcaggtccctttgctggcaccaagcccgagcctgagccggacccggggcccaagaggcctgtgcgccctgcgagcccttgagctccaggggaggtccgccccaggcagggcggctcatcccccagaccacttcggatccagctgtttgttgaggagccaggaaacgccctgacacttttgcggccctgtccccgtctctaagatggggatgatagtatttctggccattcctgagcacagcaggacctgccttttccctttgactggaaggttcttctctacacctatcttgataacctgccacctccacagggaggtcttctctatctcccgatttaaaattgcagctctgagaagccgggcatggtggcatatgcctgtagtcccagctacggggggaggctgaggtgggaggatcgcttggtcccaggagttggaggctgcagtgagctctgatcgctccactgcactatagcctgggcaaaagagcaagaaactgtctctaaaaatataaaataaaattgcacctcttgtgtacttccccgtctgcttctttacctgaatacttactatctcaccggctaggtgctttatgactctcgttagtctctcccaccccaacctttgcactacattgcccgagggcagctcttgtcactgctgtagaacaaagtmctgcacagagacgatagccaagaaatagttaataaaataatggaaaacgggtgccttctactgagcacccgctaatwgtgagtgagtagaggacttgccctggggacattcagtgacctgctgggtgttgctgagctgtgaggaagttcaggtctggctgcagtggtgaggctgtgactcaatcaatcactgctgatgctcccaggacctgcaccagcttagtcccaggggcaaggattttaaacccccacctccatttcctcatctgtaagatgcaaataacagtcacctctgcctcacgggatggagctgtgtaatgcccggaacagtgcctgctgcatagaggggttgctgccagctgcctctccctccttgtctcttacctgcctgctgcctgggacaggatgaagcggggcccttgtgttgccccaaccctggctgttggctaagagcccacgtgatctgcctgtgagaggagttccttccggaagaaccagggcagcttytgcccctagagggccaatgccctagctgagtgcagtcccccggccccagcctggtccagctttgggaagagggtgcccagttgtgcaatccaggccggggcagccgtgtcctgatcttggtattcagggctgagcctggagggggcttgtgatgcctgactctgtctctctctctggccccatgccttggtagctgtgaggcgtcactgctttgggtgacctgatctggctgtgatggatgagcacgggggaaatagtggaagactcggaattagaagacgtgagtgggctttggccccagcctccctaccccactccctgtcctgggctgcctgtgaccaaccttgtttctgcaggcacactggatagccctgctggagctcagtgtccctaatcccctccagatactggtggcctaggggaggtcatcaaagaccggtgggacatcgacctcagcccgtttccacgcttttttttgttttttttttttttttgagaccgagtttcactcttgttgcccaggctggagtgcaatggcgtgatcttggctcaccgcaacctccgcctcccgggttcaagcgattctcctgcctcagcctcccaagtagctgggattacaggcgtgtgccaccaggcttgactaattttctatttttagtagagacaaggtttctccatgttggtcaggctggtctcaaactcccgacttcaggtgrtctgcctgcctcggcctcccaaagtgctgggattacaggagtgagccaccgtgccaggccttctccaggctcttggcaccttagccagaaacaatttaaggacaagtgcaaaagtcatgaaygtaggcagatttcctgcagagtaaagggactcactsaagaagaggaacgtgggggtcctcaagagagtgtctcatgccctacaaggtgtggggctgacctttatgggcttcttcaactaaagaggggtatattcatgaagaktccaggaaaaggtaaagatttctcaagaccgtggtgccacaatttacacccaaatacaggtgttcctggagccgtcttggcactggtgggtgtacggtttcatatgttactgattgtacagtgagatcctaggtgaaacctacatcaaatacagcgccatgttgtgtctggttggtcgtagccagcttggtcctcatcctatttttcagggacttattggcccttagcgcatgcagctatttcaagtttccttcttctcctcatgtgaaactgctgcctgggattttgtattcacttgctaccactctattaatctcacattctcgcctcttttctgtgtcaccccgtgtgggtccgacaggttgttactagagtgcaatacaaagtcttagtcaagggaacctcctgagggttgctgagggcaggggtggagctagtagcctgaggacctgccagtcacggggattcctcatgggcacagaggagggaggaggggtccatggccctagcatatgagaagcctctcctctgcctggaattcccatgcctcagcttcccccacactcccacctgtccgcttgcctctgaactcacgcatttcttggaagtcttgggagattcacctttactcagatggttgtttacctgtctcgtgcacagcttgaccttggactttaaagtgaggataaagaacgasgaggatggggggatgccccccttccacggggccctgtggcttccaaacctcggcctcctctggtctcttgtctgtggagcctccttcaaacccagggaaataaaaccacctgccacgggttgtggttcttctaggatcttctatcaatgttctctgaggtccccaggagccatgaagctggggctgactcccagggcaatgggactgcagtgtccttgttctttcttgttctatgcatccatgctctgctccacccctgccccttcactctgcccacacacatccctctagactggccttgtggtcagagcctggagtgcatgggctgctgggggcctgtgggctgcactgggccagaacccctggcaccttcaagactggcctggagccagcaggtaggtgacctttccagggcctgcctatcccagctttctcctccaatccctcccctctcttgcctgggtcaattagagagagcttgtctgttggctgcctggcagggtggagttcaggggcaggtcaggagcccagtgacagctcggaaaaaaaaaaaaaaaaaaaaaaaaaacagaaaaaaaaaacctacaaaaacaaacccaccattgggcctttcccctttcattcttctgttttctacacagcaaactcagtcgtggctttggagatcactttaagcttgtctccagctggcacactaaggagggtaatggagaagctcccccacccccaaccccaccccttccttccggaagcaaatctaagtccagccccggctccagatccctcccacagtggacctaggaaaccctcagctcagagaacaaccctgcattccccacacarcacccacaatcagccactgcgggcgaggagggcacraggccaggttcccaagagctcaggtgagtgacacagtggaacggcccagggcgccctcaccctgctcagcttgtggctctaacattccagaagctgaggcctctggcatcyctgccctttccccatggatatcccatttcagacaaccctggcctgcgtgaatccccctcccttcccttgtttgtttgtttttttccccggggaggcyaggtcttgctgtcacccaggctggagtgctgtgggatcctggccactgcagccttgaattcctgggctcaagtgattctcttgcctcagcctctggagtagctaggactacaggccctcatcatcctgcctggttaatgtttaagaatttttttaaagatttttagagatggggtcttgcaatgctgcaccaggttggtctccaactcctggcctcagcctccctagggtctgggattataggtgggagccaccctgcctaggcctstgcttttgctgagtcatcagagttttgttcattcccacagcagctctggcccctagtagcagctcagttcctcaatgggccgtgtttgtcctggagcccagatggactgtggccaggcaagtggatcacaggcctggctggcctgggcggtttccacatgtgaggggctgaggggctcaaggaggggagcatctccactgggtggaggctgggggtcccagcaggaartggtgagacaaagggcgctggctggcagggagacagcacaggaaggtcctagagsttcctcagtgcagctggactctcctggagaccttcacacaccctgacatctgggccttgcccgacgagggtgctttcactggtctgcaccatggcccaggccctgggattttgaacagctccgcaggtgaatgaaaggtgaggccaggctggggaaccaccrcattagagcccgacctggttttcagccccagccccgccactgastggcyttgtgagtgcgggcaagtcactcagcctccctaggcctcagtgacttccctgaaagcaagaattccactttcttgctgttgtgatggtggtaagggaacgggcctggctctggcccctgacgcaggaacatggagctgatccaggacayctcycgcccgccactggagtacgtgaagggggtcccgctcatcaagtactttgcagaggcactggggcccctgcagagcttccaggcccggcctgatgacctgctcatcagcacctaccccaagtccggtargtgaggagggccacccaccctctcccaggtggcagtccccaccttggccagcgaggtcgtgccctcagcctgctcaccycccatctccctccctctccaggcacyacctgggtragccagattctggacatgatctaccagggyggtgacctggaraagtgtcaccgagctcccatcttcatgcgggtgcccttccttgagttcaaagycccagggattccctcaggtgtgtgagtgtgtcctgggtgcaaggggagtggaggaagacagggctggggcttcagctcaccagaccttccctgacccactgctcagggatggagactctgaaagacacaccggccccacgactcctgaagacacacctgcccctggctctgctcccccagactctgttggatcagaaggtcaaggtgaggcagggcacagtgtttcacatccataatcccagcactttgggaggctgaggcaggcagatcacctgaggttgggagtttgagagcaccctgagcaacatagaagaaccttgtctctactaaaaatacaaaattagccgggtgtggtggcgggtgcctgtaatcccagctactccgaagcctgagacaggagaatcacttgaacccgggagaaggaggttgtggtgagccagagatcccaccattgcattccagcctgagcaacaagagcaaaactcacaaaaataaataaataaataratatataaataaaaataaaactgtggcacctgtggtggctcactgctgtaatgccagcactttgggaggccaaattgggtggatcacttgagctcaggagttacagaccagcccgggaaacatggggagtctccatctctataaaaatgcaaaatatcagcagggcatggtggcatrgcgctgtagttccagctactggaaagtctgaggttggaggattgcttgagcctggraggtcaaggttgcagtgagttattatcactccagtgcactccaacttgggcgacagaaaaaaagaaagaccacggtccttttttttttttttttttttgagactctctgtctcaaaaataaataaataaaataaaataaartaaaataaatcccacaataaaaagaaaaagcaaaggtccaggtgtggggcatgtgaatccagggaaggaggccctggctcagcccagctttggtcctgttcttctgggaaagtcgcctcacttcctccagccttgtctcatcttctgcggcggggactgtctgcctcttgctctgatgaccaagaacgtaagrctcttcagtgtagacctaagaaagctagaggrtgggtcctcacaggcccacaaaatttggtggcggtgggatcacggctggtggagcrtgccttgctccagatyggggtgtgacgcattgatgcagattatattrctatagaatatgatggtctcagggaccaggcaggactttggcttctgagcagggttcagmtcctgacttggccctaccggtgccgtgagatctcaaacaagtcagcctctaagcctcaggttcctcctttgccaawccaagagatgagctggcctgggrcaggctgtgtggtgatggtgctggggttgagtcttctgcccctgcaggtggtctatgttgcccgcaacgcaaaggatgtggcrgtttcctactaccacttctaccacatggccaargtgyaccctsascctgggacctgggacagcttcctggagaagttcatggtcggagaaggtgggtttgatgggaggaaggaaagtgtggagcyaaggggtggtggctacaacgcacagcaaccctgtgtyggcacyccttgccygcttctccagtgtcctacggatcctggtaccagcacgtgcargagtggtgggagctgagccgcacccaccctgttctctacctcttctatgaagacatgaaggaggtgagaccacstgcgawgcttccctccatgtgactcctgggggcaggcacctcacagggacccgccaaggccacccagccccctccctgggcagcccccacagcaggaccagattccccatcctgccttcttggcccaggcctccccactaaggccccacctggcagcgggccccacacagctctcatctctcgcacctgagtcagctgcatggggggccacggatcagaaacttagtcctattgctactccctgccaaagggtgtgctacccagggccacagtcacagaagaagaccatcacggtcctcacccataggagccaagcccagctcatgatgggatcacagggcagacagcaattctttttacccccgggactggggccctgggggttgaggagttggctctgcagggtttctaggagaagtggccagatcgcctctgaggttagagaaggggaccccttttacttttcctgaatcagtaatccgagcctccactgaggggccctctgctgctcagaacccgaaaagggagattcaaaagatcctggagtttgtggggcrctccctgccagaggagacygtggacttcrtggttsagcacacgtcgttcaaggagatgaagaagamccctatgaccaactacaccmccgtcccccaggagttcatggaccacagcatctcccccttcatgaggaaaggtgggtgcyggccagcacgggggtttggggcgggtgggagcagcagctgcagcctccccataggcacttggggcctcccctgggatgagactccagctttgctccctgccttcctcccccaggcatggctggggactggaaraccaccttcaccgtggcgcagaatgagcgcttcgatgcggactatgcgragaagatggcaggctgcagcctcascttccgctctgagctgtgagaggggytcctggrgtcactgcagagggagtgtgcgaatcaaacctgaccaagcggctcaagaataaaatatgaattgagggccygggacggtaggtcatgtctgtaatcccagcaatttggaggctgaggtgggaggatcatttgagcccaggagttcgagaccaacctgggcaacatagtgagattctgttaaaaaaataaaataaaataaaaccaatttttaaaaagagaataaaatatgattgtgggccaggcakagtggctcatgcctgtaatcccagcaatttgagaagttgaggctagaggatcactggaggacaggagtttgggaccagcctgttcaacattacaagacatcatccctacaaaaatttgagaaaattatctgtacgtgatggtgggcacctgtagtcccarctacttgacaagtgaaggcagkaggatcgcctgagccagggaggttatggctgcagtgggctgactgggctaatccactcaagcctgagggacagagcaaatcttgcttgagaaataaataaaatacaatttacttaacataaattatgattcaggaccagtctggccaacatggtgaaaccccgtctctactaaaaaaaaaaaaagatacaaaaattagccgggcatggtggcagacacctgtaacctcagctactctggaggctgaggcaggagaatcgctcgaacccagggacggatgttgcagtgagccaagatcatgccacttcactccagcctgggcataagagcaaaactctgtcttgaaaataaataaataattaaattaaattaagktattatttgacctgggctcggtggcttatgcctgtaatctcagcacttcagcctggcagatcacttgaggtcaggagttcaagaccagcctggccagcatggcaaaaccccatctctactaaaaatacaaaaattagctgggcatgatgatgggcgcctgtaatcccagctactccagaggctgaggtgggagaatcgattgaatccatgaggtggaggtttcattgaaccgggatcacaccgctgcactccagtctgggcgacagagcaagactcagtcttaaaacaacaacaacaacaacaacaacaacacaactatgatttgtgttcaatgcagagtctctattccaagccaagagaaaccctgagctgaaagagtgatcgcccactggggccaaatacggccacctctccgctccagctcctcaacttgacctgtttggagaggggagagggtctggagaagtaaaacccaggagacgagtggagggggaatgtgtttaatcccagcacatcctttgctgtcctgccctgtgtcgttggtggatggcgagtccgccaggcagcgtcactttttcttgggctccttacaagccaccacctacctctgggccacgctgaggggaggggaatgcttgaagacactcaagcataggagtgtcttcaaacaggaccaagtagtcatcctggggctgtggggcaggcagacaggaggggctgctcagagatccccaggccatgacaggcacccccttcccccagcctagaccacaggaggctctgggccgtggactttcagccactcctgccattgttcactctggggtcaagaagtcttggcccagtccctgctgctatggagctcttttctcagtggctggaggcccagagcagtgaaaaaggtggagagaggaagaggtgctgactccttccccagtggggccatagctagagggtctgctgcctttcagggactctgtgttcagaggaccgagggcagcccagatggtggcaggcagggatcctggcctcaggtggcttgtgtcccatgtcaccaggagcatgagggggcaggagccgtgggttcagggcaggagcttcctgtctcagagctggttctcctggggctgcagaagggaagccgctgacttggggcttgccaaggctgccagggctggcaaggggacggtagcctttggggctggagtggaagagggagggctgctggcaggtcccattagctcgggagatgaggacaagggggacagagcaggaagaggacccctagcttctctgatcagcctgttcctggtgtcaccaatgacctctcccctggaggctgctttacccgctgtaggggcgcatggatcagggcacggtagaagcaggtggtctggggttacagggccaacatgagctgctccttctggaacaaggccttggggtccatctgggggttggccttccactgatgccatgactgccagctcatggtgtgtctcctggcaggttgtgtcaatctgtctggggacactctgtgatacctgggttctcgtcctcttgggttaaaataaattaagtaggcggtgcgcagtggctcacacctgtaatcccagcactttgggaagctgagaggggtggattacctgatgtcaagagttcaagaccagcctggccaacatgacgaaaccctgtctctactaaaaatataaaattagccaggcgtggtggtgagccctatcatcccagctacacagaaggctgaggcaggagaatcgcttgaacccaagactcagaggttgcagtgagtcgagattgtgccactgcactccagcctgggccacagagtgagaccccatctaagataataataataataataataataataataataataataataataaataaaatgatttaaacaagagacacacagcaaaagaagtggagcatagaataacttattgcaaaagaaaacagtatattgaaagttaattgcagaatagacaatacaccttgagcgagttcagaagggactgcttgtcaggttgggacggtgttgattactgcaggaaaaactccctttatgggagtctcacacaactcttcataatgggtgggaagaggcatcactagtaagcatgttctgggtggtcctctgggtgcacatgcgcatttgctatacatgcttgctcctaggactcatgtctcattagcatcttaaatctccacccaggggtatggtttttactattaaaatgagcaaagtgtcagtttgctgaccctttgcacatgttctcaaaagggaaagtccctactggagatagctttgcttgaatgagctcagtgaccaggtgaatgccgaggcttcctgtgttggccgtgctgtcaccaaggtcacagcatcctgagaacatggttttctccttgactaacaaggcctcggggtctgtctcggggttggccttccaccgggtcagcgggatgatccggcgcaagctcacggtgtgtctcctggtggtagaggggcttgtgtcaacctgtggccgggtggggatgctccttcccagctggtaggctgcccccaggctccatgccctgccctggcctggacactcacgctttgccttcttcatcaatgtcatctacctcatacctgtggacaaaaggaggaaaatgcaggatgcagccaggggcacagtccctgtaggggagtgtggaggacaggggcagggcgaggacccggtgctccctgcacagccggccccgcccacagcacgctctgtggagtttttctcnnnnnnnnnnnnnnnnnnnnnnnnnnnnnnnnnnnnnnnnnnnnnnnnnnnnnnnnnnnnnnnnnnnnnnnnnnnnnnnnnnnnnnnnnnnnnnnnnnnnnnnnnnnnnnnnnnnnnnnnnnnnnnnnnnnnnnnnnnnnnnnnnnnnnnnnnnnnnnnnnnnnnnnnnnnnnnnnnnnnnnnnnnnnnnnnnnnnnnnnnnnnnnnnnnnnnnnnnnnnnnnnnnnnnnnnnnnnnnnnnnnnnnnnnnnnnnnnnnnnnnnnnnnnnnnnnnnnnnnnnnnnnnnnnnnnnnnnnnnnnnnnnnnnnnnnnnnnnnnnnnnnnnnnnnnnnnnnnnnnnnnnnnnnnnnnnnnnnnnnnnnnnnnnnnnnnnnnnnnnnnnnnnnnnnnnnnnnnnnnnnnnnnnnnnnnnnnnnnnnnnnnnnnnnnnnnnnnnnnnnnnnnnnnnnnnnnnnnnnnnnnnnnnnnnnnnnnnnnnnnnnnnnnnnnnnnnnnnnnnnnnnnnnnnnnnnnnnnnnnnnnnnnnnnnnnnnnnnnnnnnnnnnnnnnnnnnnnnnnnnnnnnnnnnnnnnnnnnnnnnnnnnnnnnnnnnnnnnnnnnnnnnnnnnnnnnnnnnnnnnnnnnnnnnnnnnnnnnnnnnnnnnnnnnnnnnnnnnnnnnnnnnnnnnnnnnnnnnnnnnnnnnnnnnnnnnnnnnnnnnnnnnnnnnnnnnnnnnnnnnnnnnnnnnnnnnnnnnnnnnnnnnnnnnnnnnnnnnnnnnnnnnnnnnnnnnnnnnnnnnnnnnnnnnnnnnnnnnnnnnnnnnnnnnnnnnnnnnnnnnnnnnnnnnnnnnnnnnnnnnnnnnnnnnnnnnnnnnnnnnnnnnnnnnnnnnnnnnnnnnnnnnnnnnnnnnnnnnnnnnnnnnnnnnnnnnnnnnnnnnnnnnnnnnnnnnnnnnnnnnnnnnnnnnnnnnnnnnnnnnnnnnnnnnnnnnnnnnnnnnnnnnnnnnnnnnnnnnnnnnnnnnnnnnnnnnnnnnnnnnnnnnnnnnnnnnnnnnnnnnnnnnnnnnnnnnnnnnnnnnnnnnnnnnnnnnnnnnnnnnnnnnnnnnnnnnnnnnnnnnnnnnnnnnnnnnnnnnnnnnnnnnnnnnnnnnnnnnnnnnnnnnnnnnnnnnnnnnnnnnnnnnnnnnnnnnnnnnnnnnnnnnnnnnnnnnnnnnnnnnnnnnnnnnnnnnnnnnnnnnnnnnnnnnnnnnnnnnnnnnnnnnnnnnnnnnnnnnnnnnnnnnnnnnnnnnnnnnnnnnnnnnnnnnnnnnnnnnnnnnnnnnnnnnnnnnnnnnnnnnnnnnnnnnnnnnnnnnnnnnnnnnnnnnnnnnnnnnnnnnnnnnnnnnnnnnnnnnnnnnnnnnnnnnnnnnnnnnnnnnnnnnnnnnnnnnnnnnnnnnnnnnnnnnnnnnnnnnnnnnnnnnnnnnnnnnnnnnnnnnnnnnnnnnnnnnnnnnnnnnnnnnnnnnnnnnnnnnnnnnnnnnnnnnnnnnnnnnnnnnnnnnnnnnnnnnnnnnnnnnnnnnnnnnnnnnnnnnnnnnnnnnnnnnnnnnnnnnnnnnnnnnnnnnnnnnnnnnnnnnnnnnnnnnnnnnnnnnnnnnnnnnnnnnnnnnnnnnnnnnnnnnnnnnnnnnnnnnnnnnnnnnnnnnnnnnnnnnnnnnnnnnnnnnnnnnnnnnnnnnnnnnnnnnnnnnnnnnnnnnnnnnnnnnnnnnnnnnnnnnnnnnnnnnnnnnnnnnnnnnnnnnnnnnnnnnnnnnnnnnnnnnnnnnnnnnnnnnnnnnnnnnnnnnnnnnnnnnnnnnnnnnnnnnnnnnnnnnnnnnnnnnnnnnnnnnnnnnnnnnnnnnnnnnnnnnnnnnnnnnnnnnnnnnnnnnnnnnnnnnnnnnnnnnnnnnnnnnnnnnnnnnnnnnnnnnnnnnnnnnnnnnnnnnnnnnnnnnnnnnnnnnnnnnnnnnnnnnnnnnnnnnnnnnnnnnnnnnnnnnnnnnnnnnnnnnnnnnnnnnnnnnnnnnnnnnnnnnnnnnnnnnnnnnnnnnnnnnnnnnnnnnnnnnnnnnnnnnnnnnnnnnnnnnnnnnnnnnnnnnnnnnnnnnnnnnnnnnnnnnnnnnnnnnnnnnnnnnnnnnnnnnnnnnnnnnnnnnnnnnnnnnnnnnnnnnnnnnnnnnnnnnnnnnnnnnnnnnnnnnnnnnnnnnnnnnnnnnnnnnnnnnnnnnnnnnnnnnnnnnnnnnnnnnnnnnnnnnnnnnnnnnnnnnnnnnnnnnnnnnnnnnnnnnnnnnnnnnnnnnnnnnnnnnnnnnnnnnnnnnnnnnnnnnnnnnnnnnnnnnnnnnnnnnnnnnnnnnnnnnnnnnnnnnnnnnnnnnnnnnnnnnnnnnnnnnnnnnnnnnnnnnnnnnnnnnnnnnnnnnnnnnnnnnnnnnnnnnnnnnnnnnnnnnnnnnnnnnnnnnnnnnnnnnnnnnnnnnnnnnnnnnnnnnnnnnnnnnnnnnnnnnnnnnnnnnnnnnnnnnnnnnnnnnnnnnnnnnnnnnnnnnnnnnnnnnnnnnnnnnnnnnnnnnnnnnnnnnnnnnnnnnnnnnnnnnnnnnnnnnnnnnnnnnnnnnnnnnnnnnnnnnnnnnnnnnnnnnnnnnnnnnnnnnnnnnnnnnnnnnnnnnnnnnnnnnnnnnnnnnnnnnnnnnnnnnnnnnnnnnnnnnnnnnnnnnnnnnnnnnnnnnnnnnnnnnnnnnnnnnnnnnnnnnnnnnnnnnnnnnnnnnnnnnnnnnnnnnnnnnnnnnnnnnnnnnnnnnnnnnnnnnnnnnnnnnnnnnnnnnnnnnnnnnnnnnnnnnnnnnnnnnnnnnnnnnnnnnnnnnnnnnnnnnnnnnnnnnnnnnnnnnnnnnnnnnnnnnnnnnnnnnnnnnnnnnnnnnnnnnnnnnnnnnnnnnnnnnnnnnnnnnn

SEQ ID NO: 94412 - DNA, 237866 bp, Homo sapiens
  misc_feature (1)...(237866): n = A,T,C or G
caagataaaataataacttttggcattatttaaagagtccgtagaatttactttcatactatagaaataatatcagcacaatatttaggtttatacaaaactagggttaaatttctcatggttaaaatatctgataaaaactttagccgggctgggcgcggtgacgcacacctgtaatcccagcactttgggaggccgaggcgggcagatcacaaggtcagaagatcgagaccatccaaactaacacggtgaaaccccgtctgtactaaaaatacaaaaaattagccgggcttggtggtgggctcctgtagtcccagctactcgggaggctgaggcaggagaatggcatgaacctgggaggcggagcttgccagtggccgagatcgcgccactgcactccagcctaggtgacagagcgagactcggtctttaaaaaaaaaaaaaaaaaaacttcagccaaattaaatttaaaggagtttaattgagcaatgaacgattcgtgaatccagcagcctccagaatcacagcagattgacagagacctcaggggtgcctcatggtcagaacaaatgtatagacaaaaaaggtaaagtgacgtacaggaatcagaagtgaggtacataaacagtgattggttacagctcagtgtttggcttacttgaacgcagtttgaacattcagcagtctgtgagtggttgaagtatggccgctgggattggccaatactcagctgttgttacaggcatactattaagttaggttttcaattttgtctattaagctaggttacagttcatccacaaggactcaaatataggagtatggagtccttctcaggccatattattttgctttaacatttctgaaattggtttcatgtgttaagtaaattatcactgtttgtatgataactttttaaaaatataaaagcatattcaaataaatagaatgatatatagcaggttagattctggaaattaattcttgtaaaaccattgagactatatagttcttggaaggtctttgtgcactccagtttgaaggcttatgttttaaagcaaggataaagaatttgggttagtcgtaaatctctttcaagagtttggacctccttttgaacctagtagagtgtcactgacaatctttggaataaggagaatgacatgattagtgctgtgctttagggaataaacagaatgggtggattcatctactcattcaacaagtgctgtattctggatagtgtggactaaaaggtgcagaaaacaaagtttctaccgtcctagagcttacattctaatgggaaaagacaaacaattatagggcagaggaagcaatcagatatgcatttgtgtcaggtgaacagggggatgactttgagtcagctagtgatggatgctattgaaaagataaagcaagcgctattctagacagtatgaatacataccctctgtcccatggagtttgcatcctaacggggaaagactagaaataaatgaaacaatagcatgtcaggaagtgatagtagcagtactataaaaagttaaggagtgtgtgtgtcaagggtaaggagttttaagaaggggaggtttgggaaactaggagatgacgtgttgggagatcagagccttgacctgaataaagtgatgaaatacacctcgtgaacatctatcatggtcaaacttgtccaactcgtggcctgcgggttgcatgtaacccaggacggccttgaatgcagcccaatacaaattcataaactttttgaaaacatgagtttttttgcaacttttttaaagctcatcagctatcattagtgtttgtaactgtattttatatgtggcccacaacacttctccttccagtgtgccccagggaatacaaaagattggacaccactgatctaggcaaaaagggttccaacaaagggaacagcagtacaaagtgtagagacagagtctgcacggcatatttgggaaagcaagacagctagccttgctggagcagcatgagaaagcagaggaaaaataggaaatgatgttaggaaaggttgccaggtagaaggtaatgtaaagtcctgagggcatggaagattttgcatttgctggtgaggacagagataatactttacactgatttatgtattaaaaggatcactccagacactttaccaagaaaagaatgcaagaggactgggcgcagtggctcacgcctgtaatcccagcactttgggatgccgaggtgggtggatcacctgaggtcagtagtacgagaccagcctggacaacatggtgaaaccctatctgtactgaaaacacaaaaattagccgggcgtggtggcgggtgcctatactcccagctactcgggaggctgaggcaggagaagagcttgaacctgggaggcggaggttgcagtgagctgagattgtgccactgcacgccagcctgggtgacagagcaagattccgtctcaaaaaaaaaaaaaaaaaaaaaaaaaaaaaaaaaaaaaaaaaaagattgcaggaaggcaggattaaggagtcttgcattatgcctgtatgggaggttggtgaaattttaagtgaggactaagctctgattttctatcttgcccaaattccttctaaggtgtctggggagtcatgccctacaaaccataaattctcatcagatggattttatttgaccctgtatatcatgacttacttttcattctgactctggcataatagtatgagacaaggaaaaaaaaatatatccttgccataccttgaaattgccctgcaaagtctcttgtgggaaaaatccacattctatacagaatcccctttcccctttgtttttcttcctttctttgcagatccagtaagataatcaactaagagccaggcacccttttaggtctcttaagaaacatgttacaacctgctctctctctctctgaagtctgtctgagagattgctctgcacaataaaacttggtctccataatcctttaccttaacctaaacattcctttccactgatcccaggttttcagataaactccaccaatcgtcagtcagaaaatgtttaattttatccatagcctggaagctcccctccaccccactttaagtcgtcctgcctttctgaacgaaaccaatgcatttcttaaatgtatttgattgatgtctcatgcctctctaaaatatataaaaccaagctgcaccccgaccacctcgggcacatgttctcaggacctcctgaggctgtgtcactggccaaggtcactcatatttggctcagaataaatctcttcaaacattttacagagtttgactcttgtcatcaacctaagtcagggaaggagggtcaactgataatgacatctcatgtgtttctaatgaatgctagagttacaaaatgggagacagaaaacaaatccctaggaccctgtggagggagcgtaacttggaaactgaatataaaggcagcatgtttggggaggatgggaaaatggaagacagctttgaggctctgaaaattggtaattagaaggattgaagtaccattgcttacaataaagaaattaccacaagttggggagagaaagggaaagatgatgagttgtgattatgttgagtatatctagatgtcaatattttactgataaagataataaatttacttgtctccaaacagacaaaagttgaggctatttttatgtctcaaggaaacagccaggagccattgtttaggagtgttaaagcaaaaatacgcaagaggcaattagcctggggtggttgtgtaagtggagctcttatgtacgcacataggagcttatcttggaaacagttcttgtaactgacttattaaaacccaccagccgcaggcaatcacaaacagccaacaggatgactggttatacaactagggacctcccatcagaccacagccatataggtaaatgccttattacaccatgaccaaataaggcaaacgtagctgtagccaattaggtaatttccttactttgtttttatgtttagtctattgaagcttgctctcaggccactggagctgagctttctgaacacttctggttcagagtgctgcagatttatgaattgttgtttgctgaaataaggtgtaaagtttattttgtctaaagtttttaacaggagtgataattcaggcaaaatgttcacataatagtgggaaatcaaaagcttgcgatacagaaaagtgatatatatttgtaaactcctttaacaaaggcatcgtagcataagcatgactgtagagccagactgtcaatgttcaaattgtttctgggccttaatttctttatctgaaaatcgttaacagtggaacctagttgatagggttgttgtggagcaagcgttcttaatctggagtccatgaaatttcagcatctgtgaactttgtattgaaaaaatcgtaactttatgtctattaacctcacaacagtttcgtttctttgaattataaaggcaggcaacaaaccacagtagtattatcagtacctacaactttgtttcctatagaaattattttcatactcagtaagttgttgcagatatcttgaacaattatacgtatatattccttaagtattatatatataatatttttatattctgtatatatttttggagacagggttttgctctgtctcccaggctggagtgctgtagcatgatcggaactcactgtaacctcaaactcctgggctctagtgatccttccagcctcagtcttggaatagctaggactacaagtactccccaccatacccagctgttaatttttttttttttcgtaaagacaaggtctcactatcttgcccaggctgctctccaactcttggacacaagcctcctgcataggtctcccaaagcattgggtttacaggtgtgagccaccgtgcctggctaatactatgtatttaatttcatgcgtttagaaatatgtgctattttaagaaggcgtctacaggttttatcacattaccaaaggtgttcatggcacaagtgaagaaatctctagatactagagtaataaaaaccatgatgcattagaacggatcaggcccatatcaaacgttcaacatacagtctgctgctatggttctttttttttttttttttttttttttgagacagagtctcattctgtctcccaggctggagtgcagtggagtgatctcggctcactgcaacctctgcctcccgggtttatgccattctcctgcctcagcctcccaagtagaggaactgcaaggcgctccaccatgcccggctactttttgtatttttagtagaaatggggtttccccatgttacggcaggctggtcttgaactcctgacctcaggtgagccacctgcctcagcctcccaaagtgctgggattacaggcatgagccaccatgtccagtctgctatggttcttaaaatattcatagaatagaaattgaagtaagtctattcgtttttatattaaaagtagctagtacggtgctctgtacttatgcactccatggatgctgaatgagtcattgaatgaagtggagtctaggttgtgcctcaggccttccagtggggctggaaggaacagttgtgaagttgtggggcggcttctgtgcatcgggggactctggagttagatggtttcccagggctctgaaggagaagagctgtgttcctaataatgatctcaatgggaatagagattgctggggaccgcaggggccaggttgtcattccccaaagcttccccttcatcatccaagaaggcattcaggtctttctgtgctaggccccaggtaaagtgctggactacccagtaattgggttcagtagcaggatggcctcagattgaggtcccagggccaaaggaccactcctctcctcagcgctggtccgggaaaggcaagctccgggcgggagcgcacgccgcgcccccgaagcctggctccctcgccacgcccacttcctgcccccatcccgcgcctttccaggtcttctcccggtgaaccggatgctctgtcagtctcctcctctgcgtcctcggccgcggcccgggtccctcgcaaagccgctgccatcccggagggcccagccagcgggctcccggaggctggccgggcaggcgtggtgcgcggtaggagctgggcgcgcacggctaccgcgcgtggaggagacactgccctgccgcgatgggggcccggggcgctccttcacgccgtaggcaagcggggcggcggctgcggtacctgcccaccgggagctttcccttccttctcctgctgctgctgctctgcatccagctcgggggaggacagaagaaaaaggaggtagaatggatccccttggccttcccctgtgggcgggggcgggccagggtgggccgcgttgccaggcagccctgccgtgttgctaggcagcctggtcgccggcgtgggcgatgccggcgctggggcgggagccgcgagggtgggaggccctggggcgtttccgggacgtggagttagcagggttctgacttgaaaaacgacggcaaagcgtgttcttgactgcttctgagcacctcacacctttcagacccagggcgcctttattcccagctggaagcccagcttagagcaatggtgccactaaaaggggtgtgttggatgtgaaaataccctttggaagtatttataagcctgcaggaaatatgttttccttattttcttactctgctcccttcattacccatttcaagaagcaacagaacctgtgcagagtgtgttttaagttacactgtatgtttatttttgtttatgttgaactcggtgtatacttgtgagaataagcttgcattttttattttgtgcaagtacaacagaacatattgagagtgtgttttaagttatcctgtatgtttactttacgttgaactcagtgtatacttgtgaaaataacctgccatttattttatgtggatttatttctgaagttcattcaatctgatttcaatcttaatccaccattaactttgaaaaggttgagatttgaagtgactggttgtatttaaagtaggtggagtgtttgtaagttctaattatccatcatggatagttgatctagctgcttcagcaaaaatagttatttcgggaatgtgactagggtttctaattgtggaccattttggtgagagttatctgcttacataattgaagatagtttttcctggttaagttgtacacctacacagggctcaaaatctgaattgggtttaagatattaacaaaattttaatagctgggtagagacagtgaaaaaataccctcatatgcagagtgattgtttccctttctctttattcttagtctgaaacaaatattgtgtgttcaattttaactaatgtacctctcttcagcttttaaattttaacatgaaagtaggtcatatgaaattattggtgaagttctgctaagggatttagagaaccactgttaaactgaaattgtatttacaaatataaattaatgattttttttagcacttggtatttgtataccatattccaagagttttagatttaggagttcacgagaaaggtagaagagtgaagaaaaagtagacagttttttttgtggattaccaaagcaaagggcaataaaagatgatgaagaactccatggaaattgtgatgttttatctcctaggacgatccctaggaccacgccaattttcatttgaagggtgtgaaccccaaagtattttaagactgaccttaatcaatttttttttttttgccagtgttaaggatgcactggtgacacagcctctggaggtcctgatggcaggtgcccaaggtggtcagggtacagctggcttttatacattttagagagacataatacattgatcaatacatgtaaggtctacattggtttgatctggaagggtgggacaactcaaagggggaggggcatccaggtcataggtagatttaaaaattttctgattggcaattggttgaaagaattgttattaatagaaaggaatgtggagaccatggttttattagccagatgaagcctccaggtggcagacttcagagagaatagattgtaaatgtttcttatcagacctaaggtctgtgttgatgttaatgctggttggcttttccagaattccaagaagaaggagggtataatgagcatgtctggctcacttttcccatcgtcgcctgaagtggtttttcaggttagctttgggatatgccctcggtggagaagaggggccctttcagatggctggggcagaggtcggagggtgcttacattttkgtttttcgtttacaaggggaaaaaaaaaatctaaaaagtgtacatgtttacagcatctgagtatctccaataataagatgactttaatatgtgaaaacatttgtggatttagtataattaaatctaaattacagcaacatgtttctattaaaattttttctcgaaatatatttttgaaatgaaaaattagggagaacattgttgaggattaaaaaagtttttcttgcaaattagttttatttctcctaagtaggagcacttgatttcactgtatgacagtattacagtgtatgtatattttactgaagaaaagaagagcaaaataagagcttaaatagttgatgttttcaagactgtactttcagggatcatttctatagtttgttaaatacttggtgttctgatactttactcaataagcatgcgtatctctgaaatacaggccattccgtatctggtactcactaagttcacaaactgtgatctcttccaatattggaagggaaacacgctmtattggaaagtgtggtcaccaatgtggtattttcctagtgatagcccagggttattttgacagtatgtggtctctttctgtctagctgactttaaaacctgatgcctatgataagatttggcacaatggaacctggaagtgtagcagttgaaagttaatttactattaatataataaatattattgacatatgtaccagagtagttgatttagcatgaacagtgtttttcttccttctagaggggaagccaaactgaagtcttaagttgagcctgcaatcaggaaaggacattagttgatttaaaggaagtaatatttagtagttatgacagtaataccaccatggatggatttttaagtcagacagatagatggtcaagttacaattcagcctctaattttatgacatcaggcaaacgacaaactctctgcattttagtttgcttgctttaaaatataaatataatacccatatctcaggtattatgtatacatgtatgtaacatgtaaaatatataactatatgtatataaagactgtatataaaatgcttagtgcaatgcgtaggatataataaatggtcactaagtggtagctgttactatgtattcctcatttaaatgaaagcattagtgtaatgagatcctgaaatgcggtaagatttttttgaattggttttttttttttgctaaagaaactaactttataataataaattatatggtctgtggaatagtctattgcttatcatgaaacaccgagaattccaaattctcttacgttgtttgaaaatttcccaggaagagatttggtatcatagaagacttggtgatatcccatggatttgtgtgtgtgtgtgtgtgtgtgtgtatgtattatgtatatgtttgtacacatacacatatgcttcttcgtgaagacattttcattcattaaaaacaatgttttgttatattccctgttggagaatgtggttgagagagttaagtgaataggcaaagaagattggaaatttgtatagtcacttttcttaattacattgaatatagtcattaaaaactgatttttgaatcctcactgatgttaagtgatgtgagtttctgggagactttggctttttagtagtgtatcatttgcctrtctagtgcatcttgtgtttcttttattttgacagtttctctctttctaacttcattaacacttatcagttaatcagcttcatttagaattgttttaatttataatgacctcttctgataatgtgaaaagagctccaattctgtaattatttccagtacacttattgactttgccatcatcaaaagcagctgttataataattaatttatcttatctgcaatgaatgtgagtagctaataggccatgatatgtaggtaataatgaatatgcaatatgaaaaattgaagagctcrtgttttctaagcgatcaattgtttgactaaataaaacatatttcarttgcctttgacataacttctatatgtcattaatgtttttaagtacattttatattgggatgtataatatccagttagttttcgtggcacagctgtgaaacagagactttactatcttagcaaatgataaaaggggagaggagggaggtaagcaatggatgttacctttaagcagagaacttaagtggaagaaaaagtttgcagtgataacacaggaaatcatggtagttatgcattgatatgtacgcatatatgcacagaatatataggtgcaggcaatgtgatttcacttaggttagattgtatgtatgaccaccccttgaagcgtgattggaaatagccaaagctgcttgtcaggaatgccatagtgtcatggatgatggcagaagacatgggattcttgtgtcacagatgaaggatagtttattatagcaatagaatggtctttatgtayatatggttctatattttacatgttacatacgtattatgtgttacacacatgtatacataatacctaagatgtaggtgttatattttaaaacaaggaaattaaaattcagagagtttgtcatatgcctgatgtcgtacagttagaggctgagttataactggaccatctatcttggtggtcagtattactgtcataactattaaatatttcttccttgaaagcaactaatgtccacagcaatagatagtttattacccagcatttgtactggttccttgagcttcagttcacattgagcaacatgagggggtctaggtgatgcccactcatgtagtgaattacactgcaggagaggaaccttgcatttaagaaaccaaggtctttaaaaatgggcagtacacttctttgacctcttctctaaagggagacrttatctttattaaactcaaaagtaaacactcatttttctggagggggactctgtcttctttgrctatgtgctatatgcaaatatccttgaaaagatggtccagaacaagtcagtcagtccctgcattagcaagttgtgttagaaacccatgaggaattgtctgtccacgtaagagataggagcttggtcaaaagagaacattttcagggtatttttctccacatgcaccaccagcatgtttagtcccatatatgtgccctcttccacacatagggcacagagaaggggaaagagtggaaacataactcaagctaaagagtaatcaactcttaaccttttgctgcatttactttttcattatytccctctttagccctacatattcatcgattttagatgtgagtgtggtctgttatgcctgtgactgctgtagattatttcagtgatcttcagcgtttatttggcatgtcagactatctcagactatcagatatctctgatatttggcatatcagactataaattgctcatstccataagaattcctcctggagtatcatgctaatcctaccaggatagaaaatttacttttggttaagtgtaggaataatgtgttccccagctggaaaacaagtacataaacaaaggtttatttgttatataacagtgtgtgtatgcacatatttgcatgtgtgtatgtgtgtaacaaatggatatttctcctggtctctatccagtctttatttctatcttttgggcaagatttctgcagcttctcaaactgagcatgtctgaaagggaactcttgatccttccttcgccacatctggcccatgtgttttctcattgctgttttatggaaaacaaattttaacattctggcacatcagtttttatctaatcacttgccggtataatacagctttgtagttcttaccctgtattttgcagatagtacacagggatgctggcttcacataatttcttggggagttgtacatggactattttacaagaagtattactgttttttttacatagataagtaagacatatataaatagattgaatattaaggcttcaaagatgttattcagaagaataattttttcttttttcttttgggagacagagttttgctcttgttgcccaggctggagtgcaatggcgcaaacttggctcactgcaacctctgcctcctgggttcaagcaatccccctgcctcagcctcccgagtagctgggattacaggcatacgccaccatgcctggctaatttcgtatttttagtagagacagggtttctccatgttggtcaggctggtctctaactcccgacctcaggtgatctgcccgtctcggcctccccaaagtgctgggattacaggcatgagccactgcacctggcctagaagaataatttttttcatggtagttggyatctgtttgcctgcctgcctgcctgcctcccagttggcctgtctctatttctttttaatgttggaaggcacaaggtcaacagtaagtttagagagtgatttgaaatctgttataaaagtctaagatagaatagcatcttgttgtcatttaatgaacagaaaaaagttaaaaatatagtgaattatttatggtatatttattattattaaaattttggttaatcatgtaaagatacctaccaagtttgatatttgaaggtgaaaaataaattttctttccccttgatgttaccatgagaactcaagtacctataatgtaatggaaagggcactttagtacaggttaaataagttgtagcactgattttatttaatggaaatatttgtgattttagaagtataatttttagaaatggcataacatggttgtcattgtgatttgactcaacttttggaaatattttggtacggagttttctctgcttggaaacagcaaaccattgccaagttagtttctaggagttttacagtaaaactaaaggtcataaattgtgaaatctttttgctattcatattaaatactaaattgaatgaaataccttagtataacttactgaatttaatgaacttggtggtcgataataaggcttaaattatatcaggaaaataaaaataaaacaagcaacaagcagacaggatactaggcatttgacttagttagattgttgtcgtagattgaatgtttatgttcccacaaaatttataggttgaaatcctaactttgagtgagaaagtattaggaggtggggcctttgggaagtgattaggtcctcagggtgccgccctcatgaattagattagtgcccttataaataggaccccagagagctctctggtcctcgttctcccaagtgaggaagtgccctttccattgcattatgggtacttgagttctcatggtaacatgaaggggaaagaaaatttatttttcactttcaaatatcaaacttggtaggtatctttacacgattaaccaacattttcataataataaatataccagtaaataattcactttatttttaacttttttctgttatttttaactttattttattttttatttatttttaattgttttttcttctgtgagaagatagcaatgtgagcaatctgcagtccagaagggagctttcaccagaacccgaccatgctggaactctgatcttggacttccagcacccagacctgtgagaaataaatttccgttgccccctagtttatggtaatttgttatagcagcccaaacgaacgaagacaattgtatataattttcacaatatctttgcctgatggttgtgacaaactatttgtctaacttttgtctttactgacagtagattggtttggtttaagtattgagagaagctgggacacttgccagccctaagcaataatttctatcagttaaagatcatcattatttcagcatcttgcaaattattgttttagaagtgagtatatgatacagttgtacatggctttgggaaagtttccttcttctttacagagggcacacaaggacgggaaattttctcatcctgtctttggagtgtgtgtatgagaatgtgatgctttggttgctgaaaccatcttattacctcgaaagtacacgcctgagggcaaaaaacagcatagaaaaatgggaagaactgggtacttgatgacatgtcttagccttgtaattgctctctcaactccttgctttgtgagttaataaccttccttattgtttagsacatttcaaattggatttctgatattttgtatctaaaatcattctactaagggaggtattgttgaattaagcattttgcccatgactgtacaacttgtatgtttacagttttactccagaattctccttctacmctatgttttaataactagctatacaacgctatttgtcaattacatattaaatatcagtaggagattgttgaggtacatgtagccctccctgatccttgaatctcagtgatcactattaaaaagcatctgtgcatgtttggaagagaattttccatgtgtttcttttagtgaaataagtgtttttattgagtggattgaagctctgtgttaaataatgtgtgaatcaaaaaaattgtaggaaaaagattggaaataaatttaatatgtaccttaaaaattgttagtccaaggaatgggtagaagaataatttatacctcaggtatatttgctgcatacaatgtgttttctatatgaatgctttttaaaagtacttatttattttattttattttttgagacggagtcttgctctgtcgcccaggctggagtgcagtgggctatctctgctcattgcaacccctgcctcccggattcaagtgattctcctgcctcagccacctgaggagctgggattacaggcgcrcgccaccacatctggctgatttttgtatttttagtagaggctgggtttcaccatgttgatcaggctggtctcaaactcctgacctcgtgatctgcccgcctcggcctcccaaagtgctgggattacaggcgtgagccaccatgctcggcctaatgtacttacttatttttttgtgtgtgcctataattgattggtaggtgttttcattttaaaggcataccaaatgaaatacaaagagtcatttaacttttatttttagaatattatattttaataatattcttttggttaacatgtgagttaagttgaaggaaaagaaaacggggcctcccttaaggaagggagaatgctgattggtccatgttttttagaattttcaaggggartaaaagtttttctcgtactcataatagtggagtggttgtgctgttttttgccattgtttcctgtacatttttcctcttgaagcatttatgaggaaggatggctgaatcaaggttgaatactaccatgatggtgtagcaggacgagccgcagacaagaacccctcagacactgaattgtagaaggaaagggcttcattcagctgggagcatcagcagactcacatctccaaaaaccgagctccccgagtgggcaattcctgtcacctttaagggcttacaactctaaggggatccatgtgagagggtcatgatcgattgagcaagcacggggtacgtgactgggggctgctcacacctgcaccagtaattagaatggaacagaacaggacagggattttcacaatgcttttccatacaatgtctgtaatcatagccgattaggtcaggggtcgttctttaactaccaggcccagggtgtggcaccgggctgtctgtctgtggatttcatttctgccttttagtttttatttctgttttctttggaggcagaaatttggcataagacaatatgatgggtggtctcctcccttaatggcacttgaattcagcttggctttccattgacagccacatgagttgcatgcttagatgttggacatagtgtaaatcataagagaatagtaactgtagaatgtgattttacaaaatattgcattatagaatgttagagcaggaaagtcaggtttcaggctaaataacaaagctgggactaaaaacaaggtttcctcataccagagtttgtgttattgtattctcatgctccattatcaagaatttatgctgtcagggtcttaccctcctaccctgcccccatcccctgtcctttcgccactttcatactgtttcattactatcatgattctttcctctgtctttttgtagctgatctttttttaattagttagttaattatttttttttaaagatagtgtctctcactgtcacccaggttggagtgcagtggcatggtctcatctcactgcaacctctgcctcccgggttcaagtgattctcgtgcctcagcctcccgagtagctgggattacaagcgtgcaccacaacacttggctaatttttgtatttttagtagagacggggtttcatcatgttcgccatgctggccttaaattcctaacctcgggtgatctgcccgcctcggcctcccaagtgctgggattacaggggtgaaataaaatggtaacttacaaagtgttaaggaccttgtaaaaattctagataaataaatgtggattctagttcctttgatttaaactctgtgttcttgggaaagtcacttaaccgtttggagcagcagttgtcctcaaatgtaaaatgagagggttgaacaagatcaggatwtctgaacatggtaaatgcagaaaaagtttcccattagttctctgaaattacatacattttcatttatggaataaatgtgtttttctggcatatctttaatttttattagrttctaaaaatgcctagaaactactakagtagacttttagatcctttctagatttttaagattatataaaatatggtaatagaatgatttatggtagtttctctatatatcaaagctaattttatgttttagaagttgactcatgataacagtcttgctttgatttgattaaaactttcttataaagaagcctaaataacgttaattttcaacaatttaattgagttatatgattcgtggggrgtaacaaaaactaattgtggctgagctgtgtaagttcttttatttgactgtcaaatagcaattaaatttacactcattatttttgcctgtttcaaatacctaatctacaaagccataaattaaatcagtaagctacttttgttcattgctgtagttttcaaagaacttcataggtgttatataccacagtaactcaggagaaacaacttaagaagttatttgtcttagtcattactgccggtctcttgtgttcaaggtacgtgttataagggtaagaaacaaaatattctgcaaggttttaaaaaggaatgggagggtactggttgtattacttcccttttctctgtatcccttttccttcaaaagttacttctgttgagttagcgtcatagcatttgtatacatagttcataatctttgtttttggattttcacagggttccatcatgacacagtaaatagatgattccagggamctttatactgtgttttaccgatttcttagtaaaatagaaacttcttgagtatggagacttctttgatttgatgtctatgccattttaattatggcagaagcccaaagtagacaagccttatatgtttgattcctgtttgggtgttgatttcttaagtatgttgtaaatgtttttcatattatgtaccttttgatgattttacgtagaaatactattattgatgtaagcaatacaaaataaatatattggagtatcatcatcctaaaatatggcacatgttactgaacaaagtgccaagttattgaagtttctccaatatgtgatctgtcattttttgtcaacaaatatttattggtgaatactacatgttaggtaggtacagtgctggattttgaaggtagagtgatgaataagacagccattgtcccggatatatcctactgctcatagttcagtgggagattcagacagaaaatcaggcagttataatgtaatataagaagtcaataaactgggaaataatgggcgctatactagcatattggggtgagctgaaaactaaagagctaatcataggaaataacccagtgaagagggcgagtgctaaacagcactggtaaaggtccagcatatgaaaaaacacagcaaattcagagaactcaaagcttggtatggctaagtttagaatacacagggtgggggaatagtggattgaggccagagtggaagtgaggatcaaatcttgaagactcttcttaagccatgttaaagaatctggatctgaacttgatcctgaaatcggtggggagaattgaagggttttatcttgggagtgacaaagtgaggtttatatttagaaggattgctatggctatgctgtggagaatagcttaggtggggatgcaagactggagaagaggcttctgcagatgtcaaagtgagaggtaatgatgacttgaaattagttgtggcagtgagaatgaagaaaaatacttggattccagagttgtttaggagccagactagacagtactcggtaattggttgtgtgcggaatgagagaaaaggagacaagggtgatgactacatttcttgataaaagggaaattctatttattgaaataggaaacaggagaagaaagattttcgaaggaagataacatgttcgtgtttgagaatgtatgagatgcctgtgtgatatctaaactgagatgtttgagaagcagaatatatggaaatgaagcttcgatctgggctgatgataaaatagacttgaaaatcattcgcctaaatgggaattgaattcatggtggtggataaaaatcacccagccagagcacttacagtaaaaaatagaggacctgttgcaaacccctcaaagataccaatattttggtgtgctgcaaaagcgatgcttgcaaaagatccttggacttcgttgctggaggagcttagaaggaaatgcagcagaattttggatgtcacaggaggagaatgttccaaggagaggtcaacagtgataagtttggactttgctgctggaggagcttacaaggaaacacagcagaattttggatgtcacaggaggagaatgttccaaggagaggtcaaaagtgataaatgttgaccactgagaggttaaataacaactgaacagttcttcggatttagcaagaacggcttcattgcagtgttacagtgaacactagaatgtggtaggttaattaatgagtgggttgtgaggaagtggaggcagccaacacttcttctcaaacaatttgctgtgaatgggaagagagagttaagtggtggtagctggagaagaagctgaaatgaaaataaagaatgttatgtcaggtgactgagaaggtaggaggaaggaatgggaagtggagaacagctgacagcattagccttatatggaaatatggtagttgttacggttgttcgtagatactttgttttcccccatgcatatggtagtgtcaggctgttcagactgccataaccatcagatgggcagcatatacaccatacaaatttttttctcacagttatgggagctgggaagtccaagatcaaggtgacctcagatccgtgtctggtgaggcccactttctcggagatggcacttctctgtcttcacatgattcaagggacaaacgagctcccttggacctatggatttttgattttgtcatctcttcaaagccccaccttccttgtatcatcacaatggtgataaggtttcaacataagaattttgtggggatacaaacatgcagacctagcaggtaggatttaactttcctaatattttgaactcagcatggccacatgactaactttagcctgtgaaatgcaaggagatgtgtgtcattgctaggcagaagcttgcagcaccattgcatgctttgctgtattcttttttcctgtcttgtgctgactgggaatgtttgagatggtagatgctttatcagccagggtctctgaatgaccagggtgagcagcctccctgacaactcacaatgaagaaatgtacttttatttatttatttttaaatactgagatttggagctcttagtgcactatagtctaacctatttggattgtttcaaggactgttgacttttgcattttactataattttttttttttttttttttgagatggagtctcactctgtcgcccaggctggagtgcagtggcgtgatttcagctcactgcaagctctgcctcccaggttcacaccattctcctgcctcagcctcccgagtagctgggaccacaggcgccctcaccacgcccggctaattttttttttgtatttttagtagagacggggtttcaccgtgttagccaggatggtgtcgatctcctgacctcgtgatccacctgcctcaacctcccaaagtgctgggattacaagcgtgagccaccgcacccggccaacattttattataattttaaatagctactgtggaaataggtaaattgactcagaaagcaatgaagcgctgctaaatcgtgtgaagggctatttaagtttggggttttggcaaggagattgaaggaacacacattatagatatagagaatgtaaggaattggttgttattttgaaaaatttacataagatttctccttgattaggtacgtaggtgacaatattataatagcagtctttttttttttttttttttttttgggggggacgagatcttactctgttgtccagggtggagtgtagtggtgtgatcttggcttactgcaacctctgcctccttggcccttggttcatgtgccaccatgccaggctaatttttttttttttttttttttttttttttttttttaaagacatggtcttgctctgttgcccaggctggagtgcagtgctgggggatcacagttcactgtggccttgacctcctgggctcaagtgatcctcccacctcagcctccccagtagctgggaccacaggcacttgccaccatgcctagctagtttttttgtattgtagagacgaagtctccctgtgttgtacaggatggccttgaactcttgggctcaagtgatccccctgccttggcctcccagagtgctgggattacagtattacagtcttaaaatgagaaattgttaggcagttaatggtaaccttcatttctctcatattttacttcgaaggtctcaaaccaatttcctgatgttttgatatttttatgaatcagataagccctttcatgtttgtaatatttcataactgttggaatattgcatgtatctaaagaatcttgtagaagtttagcaacatttgatcatttattctaaggaggcttttgtttagaagtattaactttaggtaaatttcttacggactctttcagctgtgggtcattttatgaaatataagccaatgttgatttataataatttatagttctctgataaaratatatcaataatgtatgctttctggatataaatgatcaaaaccattagaaaatagaggtaaaaatcaattttattttttatttttttattttttattttttttttattatactttaagttttagggtacatgtgcacattgtgcaggttagttacatatgtatacatgtgccaagctggtgcactgcacccactaactcgtcatctagcattaggtaaatctcccagtgctatccctcccccctccccccaccccacaacagtccccagagtgtgatattccccttcctgtgtccatgtgatctcattgttcagtccccacctatgagtgagaatatgcggtgtttggttttttgttcttgagatagtttactgagaatgttttccaatttcatccatgtccctacaaaggacatgaactcatcattttttatggctgcatagtattccatggtgtatatgtgccacattttcttaatccagtctatcattgttggacatttgggttggttccaagtctttgctgttgtgaataatgccacagtaaacatacgtgtgcatgtgtccttatagcaatacgatttatagtcctttgggtatatacccagtaatgggatggctgggtcaaatggtatttccagttctagatccctgaggaatcgccacactgacttccacaatggttgaactagtttacagtcccaccaacagtgtaaaagtgttcctctttctccacatcctctccagcacctgttgtttcctgactttttaatgattgccaytctaactggtgtgagatggtatctcattgtggttttgatttgcatttctctgatggccagtgatggtgagcattttttcatgtgttttttggctgcataaatgtcttcttttgagaagtgtctgttcatgtcctttgcccactttttgatggggttrtttgtttttttcttgwaaatttgtttgagttcattgtagattctggatattagccctttgtcagatgagtaggttgtgaaaattttctcccattttgtaggttgcctgtacactctgatggtaatttcttttgctgtgsagaagctctttagtttaattagatcccatttgtcaattttggcttttgttgccattgcttttggtgttttagacatgaagtccttgcccatgcctatgtcctgaatggtaatgcctaggttttcttctagggtttttatggttttaggtctaacgtttaagtctttaatccatcttgaattgatttttgtataaggtgtaaggaagggatccagtttcagctttctacatatggctagccagttttcccagcaccatttattaaatagggaatcctttccccattgcttgtttttctcaggttgtcaaagatcagatagttgtagatatgcggtgttatttctgagggctctgttctgttccattgatctatatctctgttttggtaccagtaccatgctgttttggttactgtagccttgtagtatagtttgaagtcaggtagtgtgatgcctccagctttgttcttttggcttaggattgacttggcgatgcgggctcttttttggttccatatgaactttaaagtagttttttccaattctgtgaagaaaggcattggtagcttgatggggatggcattgaatctataaattaccttgggcagtacggccattttcatgatattgattcttcctacccatgagcatggaatgttcttccatttgtttgtatcctcttttatttccttgagcagtggtttgtagttctccttgaagaggtccttcacatcccttgtaagttggattcctagatattttcttctctttgaagcagttgtgaatgggagttcactcatgatttggctctccgtttgtctgttgttggtgtataagaatgcttgtgatttttgtacattgattttgtatcctgagactttgctgaagttgcttatcagcttaaggagattttgggctgagacaatggggttttctagatatacaatcatgtcgtctgcaaacagggacaatttgacttcctcttttcctaattgaataccctttgtttccttctcctgcctaattgccctggccagcacttccaacactatgttgaataggagtggtgagagagggcatccctgtcttgtgccagttttcaaagggaatgcttccagtttttgcccattcagtatgatattggctgtgggtttgtcatagatagctcttattattttgagatatgtcccatcaatacctaatttattgagagtttttagcatgaagggttgttgaattttgtcaaaggctttttctgcatctcttgagataatcatgtggtttttgtctttggctctgtttatatgctggattacatttattgatttgcgtatattgaaccagccttgcgtcccagggatgaagcccacttgatcatggtggataagctttttgaagtgctgctggattcgttttgccagtattttattgaggatttttgcatcaatgttcatcaaggatattggtctaaaattctctttttttgttgtgtctctgcctggctttggtatcagaatgatgctggccctcataaaatgagttagggaggattccctctttttctattgattggaatagtttcagaaggaatggtaccagttcctccttgtatctctggtagaattcagctgtgaatccatctggtgctggactctttttggttggtaagctattgattattgccacaatttcagctcctgttattggtctattcagagattcaacttcttcctggtttagtcttgggagagtgtatgtgtcgaggaatttatccatttcttctagattttctagtttatttgcatagaggtgtttgtagtattctctgatggtagtttgtatttctgtgggatcggtggtgatatcccctttatcattttttattgcgtctgttcgattcttctctttttctttattagtcttgctagcggtctatcaatcttgttggtcctttcaaaaaaccagctcctggattcattaattttttgaagggttttttgtgtctctatttccttcagttctgctctgattttagttatttcttgctttctgctagcttttgaatgtgtttgctcttgcttttctagttcttttaattgtgatgttagggtgtcaattttggatctttcctgctttctcttgtgggcatttagtgctataaatttccctctacacactgctttgaatgcgtcccagagattctggtatgttgtgtctttgttctcgttggtttcaaagaacatctttatttctgccttcattttgttatgtacccagtagtcattcaggagcaggttgttcagtttccatgtagttgagcagttttgagtgagattcttaaccctgagttctagtttgattgcactgtggtctgacagacagtttgttataatttctgttcttttacatttgctgaggagagctttacttccaagtatgtggtcaattttggaataggtgtggtgtggtgctgacaaaaatgtatattctgttgatttggggtggagagttctgtagatgtctgttaggtccgcttggtgcagagctgagttctattcctgggtatccttgttgactttctgtctcgttgatctgtctaatgttgacggtggggtgctaaagtctcccattattaatgtgtgggagtctaattctctttgtaggtcactcaggacttgctttatgaatcttggtgctcctgtattgggtgcatatatatttaggatagttagctcttcttgttgaattgatccctttaccattatgtaatggccttctttgtctcttttgatctttgttggtttaaagtctgttttatcagagactaggattgcaacccctgcctttttttgttttccatttgcttggtagatcttcctccatccttttattttgagtctatgtgtgtctctgcacgtgagatgggtttcctgaatacagcacactgatgggtcttgactctttatccaatttgccagtctgtgtcttttaattggagcatttagtccatttacatttaaagttaatattgttatgtgtgaatttgatcctgtcatgatgatgttagctggtgattttgctcgttagttgatgcagtttcttcctagtctcgatggtctttacattttggcatgattttgcagcggctggtaccggttgttcctttccatgtttagtgcttccttcaggagctcttttagggcaggcctggtggtgacaaaatctctcagcatttgcttgtctgttaagtattttatttctccttcacttatgaagcttagtttggctggatatgaaattctgggttgaaatttcttgtctttaagaatgttgaatattggcccccactctcttctggcttgtagggtttctgctgagagatccgctgttagtctgatgggcttccctttgagggtaacccgacctttctctctggctgcccttaacattttttccttcatttcaactttggtgaatctgaccattatgtgtcttggagttgctcttctcgagaagtatctttgtggcattctctgtgtttcctgaatctgaacgttggcctgccttgctagattggggaagttctcctggataatatcctgcagagtgttttccaacttggttccattctccccatcactttcaggtacaccaatcagacgtagatttggtcttttcacatagtcccatatttcttggaggctttgctcatttctttttattcttttttctctaaacttcccttctcgcttcatttcattcatttcatcttccatcgctgataccctctcttccagttgatcgcatcggctcctgaggcttctgcattcttcacgtagttctcgagccttggttttcagctccatcagctcctttaagcacttctctgtattggttattctagttatacattcttctaaatttttttcaaagttttcaacttctttgcctttggtttgaatgtcctcctgtagctgagagtaatttgatcgtctgaagccttcttctctcagctcgtcaaagtcattctccatccagctttgttccgttgttggtgaggaactgcgttcctttggaggaggagaggcgctctgcgttttagagtttccagtttttctgttctgttttttccccatctttgtggttttatgtacttttggtctttgatgatggtgatgtacagatgggtttttggtgtggatgtcctttctgtttgttagttttccttctaacagacaggaccctcagctgcaggtctgttggaataccctgcagtgtgaggtgtcagtgtgcccctgctggggggtgcctcccagttcggctgctaggaggtcaggggtcagggacccacttgaggaggcagtctgccagttctcagatctccagctgcgtgctgggagaaccactgctctcttaaaagctgtcagacagggacatttaagtctgcagaggttactgctgtccttttgtttgtctgtgccctgcccccagaggtggagcctacagaggcaggcaggcctccttgagctgtggtgggctccacccagttcgagcttcctggctgctttgtttacctaatcaagcctgggcaatggcgggtgcccctcccccagcctcgctgccgccttgcagtttgatctcagactgcagtgctagcaatgagcgagactccgtgggtgtaggaccctccgagccaggtgcgggatataatcttgtggtgcgccgttttttaagcccgtcggaaaagcgcagtattcgggtatgagtgacccgattttccaggtgccgtccgtcacccctttctttgactcggaaagggaactccctgaccccttgcgcttcccaagtgaggcaatgcctcgccctgtttcggctggcgcacggtgtgcgcacccactctcctgcacccactgtctggcactccctagtgagatgaacccggtacctcagatggaaatgcagaaatcaccatcttctgcgttgctcaggctgggagctgtagacaggagctgttcctattcggccatcttggctcctctcttcaaaaatcaatttttaagtaggccttcatagctaagatggaaatggaaaaacagcagcagtaagaacagctatgcaggagtctagcttcagagatcttggagataagaacttcccggcattttcttataacctagttggggtatcactacacaattactgcgtgaggttgagtactgtagtgatttaccaacactgttatcttacggttttcttctgagatgttatcattcgtggattgtatataagatatcctgttctaaaaaatcttatttcttagtgtggcatagctaataaaaccgcttcgcaatttatctttccatccgtcttatctcctctcccttaagatgagtaatccactttaagcgttaagaaataggatgtaaagtgtaagggtggtttgtgggtatattagttttatattgatgcataaaaaattgccacaatttagtggcttaaaataacacccatttcttatctcctagtttctagatgtcagaagtctgggcatggtgtagctggattctgtctctgttaagggtcttaggaggccaaaattaaggtgagaccgggttgcgttcttttctgratctctgggtcctcttctcaactcattcaagttgtaggcagaattcagcttttggtagttgtaggaaggagtttcttgttttcttcctgcttgtgttgctctcagttctttgctgccaaccccaggttccagccatggagcaccatctataggcagttcacagcatggctrtttgctttattccagatcactaggatcacttttgtgacacttcttttaaaatgttttcctgattaggtgaggctaatccaggataatctctcatttaaataactcagagttaatagattagagaccttatgtttgcaaatatttgccatataaggtaacataattgtgggagcrctgttctgctatatcacaggtcttgtccatgcccaggggaggcagttacgttacagtggttcattggggattatttcatttatgcctactaaagtgggcaagcctgcacttttagattttatgtagttttaaatggtggcttataaaacccatataaacaggcatgacagtcaatgtatgggacagtattatttaatataagacatttaccaatgactataaaattaaagtgatgataactttatcatcacttcataaataacttcatgtgtgtcagtcagggttcagtcacagatgcaggaccactagaaggtgaatctctatgtctctcgatttatttgcaatggtgtgaacctgttaagtagtctctgaaaggctactgtttgcatggtgatgttggagattgtggtctgagggcaggcmgttgggaagattgctgtaaggtaaggaagattcaagaacaagctggaatcccagcattttgggaggctgaggtgggcggatcacaaggtcaggagtttgagaacagcctggccaatatggtgaaaccctgtctctgctaaaaatacaaaaattagctggttgtggtggcgcatgcctgtaataccagctactcaggaggctgaggcagaagaattgcttgaaccggggaggcagaggattcagtgagcccggattgtgccatagcactccagcctgagtgacagagtgagcctccatctcaaaaaaaaaaaaaaaaaaaagaacaacctggaacctacaaaggtggactgaaaccatcctcagagtagttttaaagctcatagttcttaaattgcatgatactgagaaaatagttattcataaaagtaagcacttgtaaataagaattatttcaagtaattcacgtatcttgtagtctcagaatacctattaaactggtctggaagtctggaagattgataggcattttccttttcatgaggatatgaacaattaaaattcaaagttaaattttcattgagtctgaaacaattgtttggtgggacatacttttaaaatggattttaatatattaaatgctttaaagaaatgtttccctcttcctctccattataggagaaaccattattattctgtcagataattacttgaagtttcaaaatttttaaaaagtgtcttttaaagtattagtttagattttttttctaatttttgtgactggcacttcaaaaatcattagaaacttcgtaacaatggggatggaattttcaaatcgaggttattaatattatggagaatagtagataactaagtttgggcagccatgttgtttttgagttaacatttctctaacagctaaaataaaaaataaaaaagtgatttcttgtctcatttgaaatattcatatacaaatcttaacgtcatccagctgtcaacagagtagtattataaaaaagaaaattgtggaatccactgtctaccgtatattattactgaatattattgaaagatacttaacatctttttaatacccccttttgtttgtgaatatgtgcagtgtctatttgaacacatttgtcaacagctttagagstacttatgtcattttccttctgtgtctttcattcttttattagattttattatatttcttttacatccgttgatggtgtgccagacctgtttaccgtatgagttttctcttcttcacagacacaagctagatgacatttcccagtgtcccatgtttagataggacattgtgacagagttctaggcgatggagtgtaaacagaggtgatctgtgtcgtctgcagcttgacccatcaagatttccccacgcttgtgctggagtgtccactcccaccctgttctaaggactcatcttgtttgcatcacaagcttccccgtgtggttctgtgttagtgtgtccctgagatttggaagatagaagagaaggagagaggccactgttctttacagagagctgaggcagattcatgggcagatatgaggtttgaagcattgttcagggaagtccaggatgaccattgtatgcattttgtattgttgctgtaacaaattatcacaaatttagaggcttaaaacaacagcaatcgattatcttacagttctggaggtgggatgtccaagtcagtctcactgggctaaagtcaaggtgtctgcaggtttgtttcctgctggaagcgttgaggggagcctttttttttttttgtcttttgcagtttctagaggctgctggcattcctcattatttcttacttggcatcattccagtctctgacttccattcccacatctgaaaaactgactctgattttcttgccttcctgttacagagacccttactattttggatctacctggctaatataggataatctcttcccatttcaggatcatttgtttagtcacatcttgtgtcaggtaaggtaacaattaacctgtttcttggaattagaacatggacatctttggtgggttgggaaggtcccacttttcagactcccacagctacctgcttagctgttgcagaccaasatagttggtggaagctttcaagacattcatacactccaggtgtagaaattcaccaggctcttgagaatcttctgctttggagctataggcagagattgtatctgttttctttaactttgtttcttttgtccttccccagtggtgttttaagcttcatctgattctctgtattaaatactttcatgcttggaacacatgcagtggtttctgttttcctgactgaagtctgatacaaagctctttccctataactakgttgagaatgtaaagagggacctggaaagccatgtgttgcggatggcagagcagccatcagcctaggtgtggatgactgtgtggtacagtctccttaatctcctgaatttggctctgtactattatatggatgtaagccactaaaattttggggtctgtctggtactacaaaactttctatagcttaattcattcttactaataaagatgacttattaaaaaytaaataccaaaacaaatatcatcgcttatgatgtatttaaacacacctgattcagagtagtacattttccttgttttttctgtccatcgtttgttaacaaagccactcagcccctgaactaacttactggtatgcattctcagtgtcttctctagacaacgttatcagaagatgctacagtttccatatttacagcagtgattcatgtaatatatcttttgccatgactagactaaaacatagaattcagaagccattctttagtagtatgttccctcttatataagatgcagcagttttattgtcagtgtatgttcatcatcagctttattaattttttcctggagctcagaaacggattttagtggttggcgttttgaggaaaacaactttaaatcattttattattcctcataggattattttgaacatgtgctattgttaccattttaagatgagggggcctaagtttaaagatttttgtcacatggtaacagctgctaaaggaaagagctggaccacaacaactgataaggaaaaaagtttaccacttttttcatcatatattcctcagaggaggtatatgtacttgtttatccgacttcacagaagacacatttttttgttgttgttgttgttgttgttktttttttgagacagggtcttgctctgttgctcagactggagtacactggcacaatcacagctcacgacagccacaaccaacctcctaggctcaagcaatcctcccgcgttagyctcctaagtagctgggattataggcacgtgtcatcatgactggttaatttgtgtgtatgtgtttgtgtttgtagagacaggattttaccatgtttcccaggctgctcttaaatttctgggatccagttatcctgcggcttcggcctcccaaaccattgggattgtaggtttgcccggccaacacatattcttacaggttgtaacatgagtcatattttggtcttcacttagtgataaccaccaggaggggcttttatactatgtgctcttggctaagataatggcaaattgggaatgtgcaacaaattctagtcatggctcttttaacttagtgatcttggttaagccaccatatctttctgggtcacagtactttcggcagttaagaattagacttgagccagatccaagattctttgaactctgacattttatcattccttttaatgaaggaactgaaaaacatttcggggcagtggggaagtggaagcattattttcagaagaacactgaagttagtattttttcaattaayaaaaagttcttcctaacttactgtttctttacttagccaccaaacattaatcactgtcttggttctagcacagtagtttwaaacgttttctcatcaaatattagcataagrtcctttgcattatatatcttcaaatcatccatggaaacttgcccagagtaggtacttacttatttaacatttaaaatagtagcaaacattttcrcatacttaagattcctcttaaatagttaagtatcataatcctgacaggtcttcaattgtcaatggctttgcatataaacctgagtagctctcttgtatcgctttttaaatatcaacttgatgaaatcctttgtcatatgtaagattgcagtcaagcatgagagtgagcaaaaaataatgtgacatgatgggttgggatagatactagggtgaaatgaggatggatgtctacatagggacaacytttgtaagtggttggaatgtaacaaatggtttttgcctctctrcaaaattttgtggttattgtgtgcacattttgaatacttagctaaggactatctcctgtggcatatgccgaactaaaaagcactaaaaaattactaagatgaatgccatgtttgcatttgggttgttggtaatgaaagacacattgagtaatgtgtggtactccttatttttgtcctctgtaggcctccactcctttttctcctctttgttttcatgttaacaacccccttttctatggccacattggtagcatattatcaggcaaggctacacatattactcattcctcttgtcacgattggcacaaggttgggaaagtgactagagccaktctctgagatttgtccaaatggaactagcagaatgattaccttgctcattggcctgtgaaattggaaggatgtgcttttcgtttgtctctcacttgggcacgaaaaagtgtggtgtgcagatgctaagcaaaaaacacaaagagaagaggcattcatttattccataaagatttaagcactrgctctgtgccagtccttgttctgggtgccatcaatgcagaaataaacaaaatgtataaaaattgttgccctcagggagcttctatagctagagggagtactgacaataccagttaagttctcatatctggtcattcctgaaaccaaatttatcttcataccttattactatatgaacttataaagtccattttgcctaaactagattgaattaggcttatgtcatttgtgatttaagatgttttgataaacatgaaagacatttataacttctttcagctttcattaagaagataatacagaaattaaaaatacacaaattctttttttttttttttcctgtggagtcttgctttatcgcctaggctgcagtgcagtggtataatcttagcgcactgcaacttccatctgccaggttcaactgattctcctgcctcagcctcccaagtagctgggattaaggtgcctgccaccacacatggctaatttttgtaaaaaaaaaatgtaaattcttattggtatatttgtgtaaaactttgtcatgtattttcacacttttttccatttttggtacttggagattacattatcatttatttttttttcctcatatttcattctaagctttaacctcatggttttctggcaaggcacattggttgactactttctttagtcattcaggaggaaataactattttgtttagtaaatattgccaagtagacctgatttacattagatagttttgctaagtcattattgtgcggcttgttatatattaaatgatcaaattttgaaaattataaaaaatcagtaacagtttcctttattactgtatgattaagagtaccatgcgaaatgtttatttatagtcttataattgttgaaatgtttttgtcccatctgcttctgcatttggcataccaagtactgtaagatagataagctactaaattcttttagtcattcttccattgcactgttctgcgtctatatctctatatagtttttcttgctacttgctggaaaatacatgggcagtttattttcatggaaaatatatactccataaatatagatgaattgaggtgataatcagagagtttcctcgtgaatttgagataaaaaattacagcatcatgataatgaaactatatacacacacaaagtttatttaacttgccttggaatatatgtgtaattatcctgacatctggatctgggcaaagataatagcttatggccagaaggagccaggtatttagaaggagcgtgagtaaataatttatgattcaaaccaggacatgtgggagagaaataaagtgcaattaataattttgctgagatgacaggagtaaactgrgactttccctgggctaacggggacatctcgttacgtgagttagaggtagggtagacggtttgaaaatggatacatagtgtttgatgcatttttgttgattagcataatttttaggaatctcagttgaaaatttttcttccttgtctgtttgtattcaaataccgtgtcacactcttgtgtatgatttgtaatccatttagtgcggaccaaaggtttaacatgttgctttggtrgctttagtgctgcttatttctctaatttttaaattcagcatttaaaattttgtcatactrcttcagtcacttcatcgcttaagaggcaattcattttctttaaaaataaataggtttatttgtatccattataaataattttggatcctatatatattgatggaaaattttgctcaaataraaccttcaggtttataaaagattcccacattattactactcttggttatagcttgtccatcgcattataaattcttgactactttctcattgtagggaagttctgattttgcatgttatatgtcatctgtgcagagtaatttatttcacaaaacactccacatctttttccagtgttaaagcaaccttgttttataatgtattttacacacacacacacacacacacacacacacacacamtcttactgaaacacatctaattgaatgttgactaagttttctaatgttgcttgctggaaattggttgaaagattgtattctttggtttgaaataagttgcaactgtatttatagcatatgaagctacataaattcagatagaggcctatgtcatttttttccctgtgtgaatcaaaagagcttggaagaagaaattggaaatgactttaaaaacatgtgattgtttggatttaattaagcggatgctacgatttatattttgttgttacatttcaatgtagttgaactaatgataactaccatttatttaatatttgctaactattttacatgtattatttcatttaagcatcatcacaagcttagcatgattttattgtataggtgaacttcaagagttgaagtaatttgcctggaatcatgcaacttgtaattgggccagtattcaaatgcagaactgacttcaaagctgttcttctgatttaagtactcttttatcagtgcttctcatactgaaagaagagagtgaatgcatacctctggggatgtggaagtgcagcatgaagctgccggattgttcaaaatatatatttgatcttatatatattaaaacattttgcaaactttgctttctattccattgcctattagttttttttttttttttttttgagattgagtcttgctgtgtcacccaggctgaagtgcagtgatatgatcttggctcactgcaacctctacctcctaggttcaagggattctcctgccccagccagagtagctgggattataggtgcctgccaccacacctgactagtttttgtatttttagtagagatggggtttcaccctgttggccaggctggtctcgaactcctgacttcaggggatccacctgcctcggcctcccaaagtgttgggattacaggcgtgagccgctgctacccaccgctattaattttttttaatgaaattgttttatactttcaattgaatacaggtgtaactttgagacatgggcttggtgccagaccactataataaagcaaatattacaataaagagttagcaagttttttggtttctcagtgcatttagaagttaggtttacactgtattgttgtctattaaatgtgcaatagcactctgtctaaaagaaaagtatatataccttaatttaaaaatgctatattgcttaaaaaatatgatcttctgagccttcagtgagttataatccttttgctggtggagggttttgcttcttgttgatggctactgaccaataagggtactggctgctgatggtgggagcarctggcaacttcttaagaaattaagttggccacattgattccctctttatttcatgaaagattcctctgttgcatggaatgctgtttgayagaattttacccatagtctgactttttgcaaaattggagtctgtcctctcaaaccctgccactgctctatcaactaagtttatgcagcgttctttctccatcagagcttttgagtgaccaggtgctttggctgtgagctgtaatatattgagaggaatcttttttttctgagcagtaggtcttaatactgggcttcaaatattcagtaaactgtgctttaaacatasgtgctgtttttcatccaggctttcttgttccatttatagagcacaggcacaatagatttagcttaattgcgctggaccttaggcttttcggaatggtaaatgaacgttggcttcaactttaagtcaccagctgcattagcccctaccaagagattcagcctgtcctttcaaaccaggcatcgacttctctctagccatggcatcgccttccagtagaaggatgtttagtctactctgaacatccgttgtttagtatacccgtctccatcaattatgctagctaaatctgggtaatttgctgcagcttcttgcagcataaacacttgctgcttcatcttggacttttatgttatggaaatggcttctttctttaaacctcatgaaccaacctctgccagctttaaatttttcttctgtagcttcctttcctgtttcagccttcattggattgaagagacttagggccttgttctgaattaggcttggtttaaggggatgttgttactgatttgatctatccaaactatttaaactttctctgtatcagcaataaggctgttttgctttcttaccattgatgtgttcactggagtagcactttaaatttccttgaaaacattgcatttgcattaacaacttgtctaactgttcggtgcaagaggtgtagcttttggcctatctgagctttccacatgccttcctcactaagtttaatcatttttagcttttgatttaaagtgagagacatgtgactctgcatttcacttgaacacctagaggtcattgttgggttattcattggcctaatttcaatgtttttatgctttaggcaataggaacgtgtgagaagagtggaggtggggaatgggtggttggtggagcagtctgaatacacatgacatttatcgattaaatttgccatgttttacgggcaccatttgtggtgccccaaaacaatcacaaaagtgacatcaaagatcactggtyacagatttccataacaaataataataatgaagaagtttgaaatattgggagagttaccagaatgtgacatagacactgactgagcacatgctgtgggaaaaatgacacccatagagttgcttaatggagagttgccatcaaccttcaatttgtaaaaaatgccttatctgtgaagcgcagttaagcaaagcacaataaaaggaagtatgtttgcttaactattgcttcagtatagtgttctctctctttctctctctctctctctctctctctctctctctctatatatatatatatatatatatatataaaagtttttttttttttgggcataccatcaagtcactcctgggaggcctaggattattctgtttgagaaagggagtcagagctgccttccaatccacatccagggtaattaccagttttaaccttactgggcttgtttgtgtcaggcagttaagctgttcctacacaatagcgtggcggtgggaatggctaggttggcttgccacacttccgtagattgtgctgctgaagatagaaggagcccagtgggtttatatttcagagcacagtagttagctgaacctgaacctagctggcttgggttcagatggtctctccttcccccctcatcccttgagggcaatgcagagggagccgctggtggatgctttaactcagtgggttggtgtcacagctgaggaagttgtttatgaaccctcagacttttaaaggggctgctagcaaacctctaattttgccctgcaggagatacagctttattattctggtgaggaaacaaaacaaatctgtcttctgcctcagggaagccctgcttctgaaggctgattttttttaatgctaacatcatctaaacatactttggaagaaaactgtgcagaaatgtcatggagaattgtttcgtcagaacatgtcatattgcaactttcctgacagttccaaatatggggggtgataggagggggagagaatattatcttcttcccagtagatggtagagaatgaagaagctgactaarccagtccttttcttaggtaattttaggcacttccataccattttttggtgatgttttgttcctggaagttattccagacttttttgtttgaatcctttattgtcttggatggacctaacaagagaagttcagcattcaccgtcaagggaagctcactggcattcaattgtcaatccatttcacagtcacctgttagtgttttgtgcacagtgagtgccctcagtaatttatagtatctccctaattccttactcccacccttcctcttgcgtttctccttctctctctttgtcttaatctatagagactccaccttttgcattcttcatcgttgctaccaaaaatatacaattataaataaatatgatgagtatgggtaagttgtacagattatggagttgtcaagaggcattatattttagtggtcaacttacattcttattacatgttttgttgtcattctgctctcatttattccctaaaacagtgttcctcagactctctcttttgcttaggccytttcctgtaactggaagattgttttctatttttaatcgttaggttagggtgggtctggacaatagatattatttagtaaagcattcagctgcctcttcaccccttgagagtaatttataagttggtaatttttctgataactgtctcacaaagcttacttttagggttttgacccatagttgcttccatgagagctagcttttatttgatagctaacattttttcattttcttttgagaatttgagagaaattttctctacagagaaatggatcaatgaaacattattttaagctagatgttactctttatgttcaaatgggtttttatccaggtgtaaatcacttggaaaacatttagagcaatcagccagttagaacctaataaacatattcaactttatactttcaattataaggagtgtctcctgctgtgaaactaactattctagtgttattgtattttaaggttattttgaaggagaatagagagtttaactttggggtggttctttttctgctgtgcttcatttttatttcttgaattatttagaaaatttttatactgactataaacttatccgtagcaattaatggtttaaaaaatattattagattgtcatgtaaaatgcacattttatgggacattatgaactgaataattttgcgatagatgtattttttttgcatataaacctatactactttatgtttggaattaataggaattaaagtggattttgtgtacttgatttttaacactttgttttaaaaggactaagactgctttgtcatgtagccaatgtgttgtattaagattcctcagtgagaattatttgattttattttgcaatgatattcaaatatatttttcaagtcaaatggaatttttatgtggcaactaatttaaatattaaactaaatatctaacatatgtgtgtacattcattgcttcattgtaagaggataatatatattttatttcaaaaattcttctgagggctgggtatggtggctcacgcctgtaatcccagcacattgggaggccraggttaggcagatcacctgaggtcaggagtttgagatcagcctggccaacatggtgaaaacccgtctctatttaaaatamaaaaattaattgagaatggtggcgggcatctataatgccaggtactccggaagctgaggcaggagaatcacttgaacccaggaggtggaggttgcagtcagctgagattgttccactgcactccagcttgggtgacagagtgagactctgccttaaaataaataaataaattcttctgagatgtacttttgcaaatattatacatagtttatatcatttttttgtggaaattatacatgtttaggctttaaaaattgcttccatgcccaagattgaaatgaattttacattggggaaagtgttataaaggtataatcaaatttatggtttatatattcaataatatattgtgaattgatataataactgagtaatataactgtttcacattttgaaactgatttcagctttttccttttgaaatttagaagttatgatgaaatttcttaatttgaacctattactaaagtttccattttaatttttctaattaatgatctcttgttaaagcaatgaatcagagtttttgaatgatgtgtgcagaattcttgcttgtttatgagagactgaattattagttcactagttgatgaactggttttcttttggtaggtaattaagaatcctctgctttttctttcttttttttttttttcttggtcctcttgttttttttttttatttttttatttttttatttatttattttttattatactttaagttttagggtacatgtgcacattgtgcaggttagttacatatgtatacatgtgccatgctggtgcgctgcacccactaactagtcatctagcattaggtatatctcccaatgctatccctccccccctccccccaccccaccacagtccccagagtgtgatattccccttcctgtgtccatgtgatctcattgttcagtccccacctatgagtgagaatatgccgtgattggttttttgttcttgtgatagtttactgagaatgatgatttccagtttcatccatgtccctacaaaggacacgaactcatcattttttatggctgcatagtattccatggtgtatatgtgccacattttcttaatccagtctatcattgttggacatttgggttggttccaagtctttgctattgtgaataatgccgcaataaacatacgtgtgcatgtgtctttatagcagcacgatttatagtcatttgggtatatacccagtaatgggatggctgggtcaaatggtatttctagttctagatccctgaggaatcgccacactgacttccacaatggttgaactagtttacagtcccaccaacagtgtaaaagtgttcctgtttctccacatcctctccagcacctgttgtttcctgactttttaatgattgccattctaactggtgtgagatggtatctcattgtggttttgatttgcatttctctgatggccagtgatgatgagcattttttcatgtgtttyttggctgcataaatgtcttcttttgagaagtgtctgttcatgtcctttgcccactttttgatggggttgtttgtttttttcttgtaaatttgtttgagttcattgtagattctggatattagccctttgtcagatgagtagcttgcgaaaattttctcccattttgtaggttgcctgttcactctgatggtagtttcttttgctgtgcagaagctcttgagtttaatgagatcccatttgtcaattttggcttttgttgccattgcttttggtgttttggacatgaagtccttgcccatgcctatgtcctgaatggtaaatgcctaggttttcttctagggtttttatggttttagctctaatgtttaaatctttaatccatcttgaattgttttatgtataaggtgtaaggaagggatccagtttcagctttctacatatggctagccagttttcccagcaccatttattaaatagggaatcctttccccattgcttgtttttctcaggtttgtcaaagatcagatagttgtagatatgcggtgttatttctgagggctctgttctgttccattgatctatatctctgttttggtaccagtaccatgctgttttggttactgtagccttgtagtatagtttgaagtcaggtagtgtgatgcctccagctttgttcttttgccttaggattgacttggcgatgcgggctcttttttggttccatatgaactttaaagtagttttttccaattctgtgaggaaagtcattggtagcttgatggggatggcattgaatctgtaaattaccttgggcagtacggccatttttatgatactgattcttcctacccatgagcatggaatgttcttccatttgtttgtatcctcttttatttccttgagcagtggtttgtagttctccttgaagaggtccttcacatcccttgtaagttggattcctaggtattttcttctctttgaagcaattgtgaatgggagttcactcatgatttggctctccgtttgtctgttgttggtgtataagaatgcttgtgatttttgtacattgattttgtatcctgagactttgctgaagttgcttatcagcttaaggagattttgggctgagatgatggggttttctagatatacaatcatgtcgtctgcaaacagggacaatttgacttcctcttttcctaattgaataccctttgtttccttctcctgcctaattgccctggccagcacttccaacactatgttgaataggagtggtgagagagggcatccctgtcttgtgccagttttcaaagggaatnnnnnnnnnnnnnnnnnnnnnnnnnnnnnnnnnnnnnnnnnnnnnnnnnnnnnnnnnnnnnnnnnnnnnnnnnnnnnnnnnnnnnnnnnnnnnnnnnnnnnnnnnnnnnnnnnnnnnnnnnnnnnnnnnnnnnnnnnnnnnnnnnnnnnnnnnnnnnnnnnnnnnnnnnnnnnnnnnnnnnnnnnnnnnnnnnnnnnnnnnnnnnnnnnnnnnnnnnnnnnnnnnnnnnnnnnnnnnnnnnnnnnnnnnnnnnnnnnnnnnnnnnnnnnnnnnnnnnnnnnnnnnnnnnnnnnnnnnnnnnnnnnnnnnnnnnnnnnnnnnnnnnnnnnnnnnnnnnnnnnnnnnnnnnnnnnnnnnnnnnnnnnnnnnnnnnnnnnnnnnnnnnnnnnnnnnnnnnnnnnnnnnnnnnnnnnnnnnnnnnnnnnnnnnnnnnnnnnnnnnnnnnnnnnnnnnnnnnnnnnnnnnnnnnnnnnnnnnnnnnnnnnnnnnnnnnnnnnnnnnnnnnnnnnnnnnnnnnnnnnnnnnnnnnnnnnnnnnnnnnnnnnnnnnnnnnnnnnnnnnnnnnnnnnnnnnnnnnnnnnnnnnnnnnnnnnnnnnnnnnnnnnnnnnnnnnnnnnnnnnnnnnnnnnnnnnnnnnnnnnnnnnnnnnnnnnnnnnnnnnnnnnnnnnnnnnnnnnnnnnnnnnnnnnnnnnnnnnnnnnnnnnnnnnnnnnnnnnnnnnnnnnnnnnnnnnnnnnnnnnnnnnnnnnnnnnnnnnnnnnnnnnnnnnnnnnnnnnnnnnnnnnnnnnnnnnnnnnnnnnnnnnnnnnnnnnnnnnnnnnnnnnnnnnnnnnnnnnnnnnnnnnnnnnnnnnnnnnnnnnnnnnnnnnnnnnnnnnnnnnnnnnnnnnnnnnnnnnnnnnnnnnnnnnnnnnnnnnnnnnnnnnnnnnnnnnnnnnnnnnnnnnnnnnnnnnnnnnnnnnnnnnnnnnnnnnnnnnnnnnnnnnnnnnnnnnnnnnnnnnnnnnnnnnnnnnnnnnnnnnnnnnnnnnnnnnnnnnnnnnnnnnnnnnnnnnnnnnnnnnnnnnnnnnnnnnnnnnnnnnnnnnnnnnnnnnnnnnnnnnnnnnnnnnnnnnnnnnnnnnnnnnnnnnnnnnnnnnnnnnnnnnnnnnnnnnnnnnnnnnnnnnnnnnnnnnnnnnnnnnnnnnnnnnnnnnnnnnnnnnnnnnnnnnnnnnnnnnnnnnnnnnnnnnnnnnnnnnnnnnnnnnnnnnnnnnnnnnnnnnnnnnnnnnnnnnnnnnnnnnnnnnnnnnnnnnnnnnnnnnnnnnnnnnnnnnnnnnnnnnnnnnnnnnnnnnnnnnnnnnnnnnnnnnnnnnnnnnnnnnnnnnnnnnnnnnnnnnnnnnnnnnnnnnnnnnnnnnnnnnnnnnnnnnnnnnnnnnnnnnnnnnnnnnnnnnnnnnnnnnnnnnnnnnnnnnnnnnnnnnnnnnnnnnnnnnnnnnnnnnnnnnnnnnnnnnnnnnnnnnnnnnntttgtaggtcactcaggacttgctttatgaatcttggtgctcctgtattgggtgcatatatatttaggatagttagctcttcttgttgaattgatccctttaccattatgtaatggccttctttgtctcttttgatctttgttggtttaaagtctgttttatcagagactaggattgcaacccctgcctttttttgttttccatttgcttggtagatcttcctccatccttttattttgagtctatgtgtgtctctgcacgtgagatgggtttcctgaatacagcacactgatgggtcttgactctttatccaatttgccagtctgtgtcttttaattggagcatttagtccatttacatttaaagttaatattgttatgtgtgaatttgatcctgtcatgatgatgttagctggtgattttgctcgttagttgatgcagtttcttcctagtctcgatggtctttacattttggcatgattttgcagcggctggtaccggttgttcctttccatgtttagtgcttccttcaggtagctcttttagggcaggcctggtggtgacaaaatctctcagcatttgcttgtctgttaagtattttatttctccttcacttatgaagcttagtttggctggatatgaaattctgggttgaaaattcttttctttaagaatgttgaatattggcccccactctcttctggcttgtagggtttctgctgagagatccgctgttagtctgatgggcttccctttgagggtaacccgacctttctctctggctgcccttaacattttttccttcatttcaactttggtgaatctgacaattatgtgtcttggagttgctcttctcgaggagtatctttgtggcattccctgtatttccttaatctgaacgttggcctgccttgctagattggggaagttctcctggataatatcctgcagagtgttttccaacttggttccattctccccatcactttcaggtacaccaatcagacgtagatttggtcttttcacatagtcccatatttcttggaggctttgctcatttctttttattcttttttctctaaacttcccttctcgcttcatttcattcatttcatcttccatcgctgataccctctcttccagttgatcgcatcggctcctgaggcttctgcattcttcacgtagttctcgagccttggttttcagctccatcagctcctttaagcacttctctgtattggttattctagttatacattcttctaaatttttttcaaagttttcaacttctttgcctttggtttgaatgtcctcccgtagctgagagtaatttgatcgtctgaagccttcttctctcagctcgtcaaagtcattctccatccagctttgttccgttgctggtgaggaactgcgttcctttggaggaggagaggcactctgcattttagagtttccagtttttcagttctgttttttccccatctttgtggttttatctacttttggtctttgatgatggtgatgtacagatgggtttttggtgtggatgtcctttctgtttgttagttttccttctaacagacaggaccctcagctgcaggtctgttggaataccctgcagtgtgaggtgtcagtgtgcccctgatgcggggtgcctcccagttaggctgcttgggggtcaggggtcagggacccacttgaggaggcagtctgcccgttctcagatctccagctgcgtgctgggagaaccactgctctcttcaaagctgtcagacagggacmyttaagtctgcagaggttactgctgtctttttgtttgtctgtgccctgcccccagagatggagcctacagaggcaggcaggcctccttgagctgtggtgggctccacccagttggagcttcccgtttacctaatcaagcctgggcaatggcgggcgcccctcccccagcctcgctgccgccttgcagtttgatctcagactgctgtgctagcagtcagcgagattccgtgggcgtaggaccctctgagccaggtgtgggatataatcttgtggtgcgccgctttttaagccggtctgaaaagcgcaatattcgggtggcagtgacccgattttccaggtgcgtctgtcacccctttctttgactcggaaagggaactccctgaccccttgcgcttcccaagtgaggcaatgcctcgccctgcttcggctcgcgcatggtgcgcgcacccactggcctgcgcccactgtctggcactccctagtgagagaaacctggtacctcagatggaaatgcagaaatcacccgtcttctgcgtcgctcacgctgggagctgtagaccggagctgttcctgttcagccatcttcctctgctttttctgtgaaggtgtaaacagtgaggtacttgaaggatgagacttaaaccaatcttttatgaatttgttttttactgttattggaaatggaagatacgtaccttcatgctataatgaaggacattttgaccactttgaatatcaacacttaataagtttctaaaaatttatgtttatattttaaatggcagttaaaaattaaagctcaaagagactaaacattaaagrtcctataaataacattgtgaaagttgatcatacaaattgggtcaatcttggcacacccagctaaaacagagtcaagaggctagggggataaagcactggtcacatgacattgctctgagaatgtaattctctgcaagcctgctgctgaaactgcctggtgtaacctgaaaccagttttatctaatagctgctggaacaacctgcctcaactcgaagattagtcttaatcagttacagtcactcaccasctccccagaactttactagagccagtgacctttctttaaatatgatatgtaacacttctcctttttagaagacctacaaccttctctttgttcttcagacatactgaagaccactcagtctgtatatacctcaaattgcaattcttgcttcccaaatcaaatcttacatttagagatctgtctgtacatttttattttgatttcaacaacatgtaaagatacatgtagctaggtgaccatgaagttgatcaatatgactggaatacaattgagaatgaaaggagaggctagtaaaaattaccccatggcaataagaataaactagaactgttctaaacaaatctaatgcaaacagggtgagattttatgtcgtcaaaatgaaattaaatagtatactttagaaatctttttaaagccatgtaagacattaaacatttaatatttgatcacagtgattatagaattcagaattatgttcaattcttttttggtttaagttcatagtcattttgtaataaaatgcggaactaataaaactcactttagatttgaaagctagagctagygcagagaagattgacggtgatggtaaaagtgaaaatcctgctacatgaggattactggaagtaatttgccaagtttagcttggaaaatgaaaaataataggcttattattgttccctttgaattataaaaatgtgttctatggttaaggctttttctttgtagctccagagagcaaaactagatcccgtggatggtaaatatatgcattcaatgtaagaaagaagaattttgaaatatcattgttttgaagtgcaattggctgcttagtgggatagcaggatagcaagctaatttgtactggaagtgttcacctttagtgctcagctgtcaagactgtacatgccatattttgtgggaggtttaattaaatttaattaaaatggawtttttttcttaagcaagtattggaagagtacattaaaagaagtataagccatttatgtatatcctaaaaccagaaaaaaaccacaaacccttattttattagagatctttcttaaaatgaggatgtagtttttggaaggaaaaatcasgaaaggaaataagaggagtagcaccttagtaagcagatgtgctgaattaaatctcatgatagatagtgtcagttgtttgtcctctgtattgcaggggcagtattttgtgagaatatgttgtttaaacaggtacttaaaggcagtgtaatcaaacacagcagcttaactgttttaatatttctgtgggaatttgaaatatttagatgtttaattgatgttaaacttgttaaagatttccttaagattcttaattgtcaacgtcataaaagtatttttatggttaatttgagtaattagagaaccaatgtgttggcgtgtagttagttataaaattatcagtctcagcacaacattgacttaaaggcagggtgatccagaaggataggggtgtttgttttgttgtttcttcccccgcttttttgtattataaaagcgagaaaagattctgcttacatgtaggaattgtcttacaattctcttatctgttttgattaatttggtcattgatcatgcattaaatgagtgctagcactcttacatgttcaggggaatctaaaggtaaagaaagtacatccttttcagagactctttagtgagggagacaggaaaactaacaagagcaatataagtgctatgatagagccactttatgagctaataagaagtctgtatctctgaatggtaagaaatggtaaaggcttcctaggtaattgagtcaatacagttttgacaaatgaggaagagtgtgacatgatggaggctgcccgttggatctggaatatgtgtgtatgggtgggggtggtgaaggaggagggtgaatggaaaatcccaggtagtgagaacaggattcattgacacaggcaatctgaaagtatagtgagtttagggaatttcaaatagtgggatcttttatatgtacagggttctattgggatttatgaagtgagtctggaaagatataattggaggtaaagctttgagagatctgaaatactatttggagtgtttgtagtttatattgtaggagacataaagacattgaacgatgatatacagatatatattacatatctgcttattaaaaagataacctttacattagtgtagaaggaattttgtgttagaaatactctaaaataagattcttgaaatcatggttatgaaagtattacatcggaagagatgatgaaaggctactgctactatgttagaaatgaagagaaggggatagagtaaaaaattcatcagttgcctaactggcgttaggaatagagtggcattaggaatacagatgtgggagctatatagggggacagagttcacttttagatccatggcatttgaagtccttggcaatttcattcaataaaggttcaagagagaggtacagatttgagatggataatgttacagtctcaccaatgcaccacaatgtagcagtttcttattctgaggtatcacctggagttctttttctcatgacctagagaagtaagaaacgtggacacaaagggtgaggttggagcgaaagtttaataagcgaaagataaaaagctgtctgctgtgaagaggggacctgggagagggttgtgtttttttacagttgaatgcaaaggcttttataggaaactgatgagggctgggcatctcatttgcataaagcgtgaatttcttgtagctccaccctgtcttcctaatgtgcctgtgggcccttagcctagaatcaatcactccctattggtttgttccccttactgtggatgttttaggggatggaattttccattgtgggactatctgggcaagtcacctgtgtagccttttttacctgttcgactgtcggaatgtcttagtcaagcccctcagtgtctgtgcctgcagactgttcttttgtttgaaaagattcaacggaggacccaccctaactgcctgcgtgagcgtgaccgggtttttttgtttctcctctctcaataatagctgccataatgtgtaagtagagagttaaagccatgaaagtagatgggatcacccatagaattcctacggaataaagagagaagatggctgaaggaaatggaattctgaagaaaatcagtgaagaaggttgaggagtagtcagggagttatgaggggaactaggagagtatggtatgtcagaaaccaggaaaaatattttaaagatggaatgattaacagtgctaaataattatgttcatataaggtcaagtcagagaagtatccatatatttgcctgttaaaaggtcatttttagttggccagaaacaatttaagtcagtagtgactgtgaaggactgaatgttgtgagttaagaagtgaattcaaggtgaaaacaaacagcttacctttgagagaagcttgtataagtcattagtggggaaaaacaccgttgtagtggggtggggaacaacaccgttaacttgaagtaaatgcatattcaaaagaggagttggttcttgggtggggtgggatggagagaccactttgcttttataggaaaacagcagaaggagtcagtaaagtaagataggagagtgggatagaagagggctaaatgattgatcaaggtctgggaataattggtttcctggaacacaagtaaagagggtcgcattacctcaggcccagccaggacacacacttctatctagatcaggagcgctagaggtaaatactgtgaatgcaaatcatttggagtgagaaactgaggagattaatgcaacatggttttaattttctctatgaagtaggagtcaggagaactgaatgctattgaaatagctgtcactcatagctgagcatacctattgtgtggagccagggttgataccgacaagcatttggggagcaggatcagtaggtgtttaagggataacagcattagtttaatccagtagttttcattgtagttcttagaccaccacctttggcgttattgggaacttcctggaattaaaattcttgggccccactgacctcctgattttgaaattcttaattttgtaaaaataagccatcctagtgattctgatgaatgctaaagtttgagaactgctggttgggggattacactttgaaaaccactgcttttcttaatatgttaatagccagtttttcttactcccttcgacatgcctaacattttttcttctattaaggaagctctgttttattttgtcctgaaacaaattatttaatagtaatttcataattaacttgctgtgctattggattatactacttataacttggatttcttctaaatatggcacagaactgaaactaatgaaattgttagtggaccttattccttacactgctctccctgtatccatcctgatcttgagtttatttttttaaaaaacttctttctggatttgttagcattccagaaatgtaccttttgcacttaaggcagcattataacattatgttttgttactgcttctgtcttttacattaaaaaagcatccactgtcttttcactccattcatatttttaaatcttttagttgacatgtaataactgtatatatttatggagtacggagtgatatttccatgtatgtatccaatgtgcaatgatcaaatcagggtaattagcatatccagcaccccaaatatttatcatgtctttgtattgggagcatccagaatcctctcttctaggtctttgaacatatacagtaatttattgttaactgtatttaccttacagtgctatagaacactagaacttattcctcctatctggctgtaattttgtatgtattaaccaacctcaccctatcctctccttccccctacatttcacagcctctaataaccataattctactctctactagtatgaactcatttttttccacatatgattgagaacatatatgatttatctttctgtgcttgagtttttaaaatttaagataatattctctgggctcatccatattgcttctaatgacaggatttcatctttaatagctaaataatattctattatrtatatatgctacattttctttatccgtttatctgttggtagacatttagattggtatcttggcaattgtgaatagcattgcagtaaacatggggctgcaggtatctttttaatatactgacttcctttcctttggataaatactcagtagtgggattgattgctggatcatttggtagttctgtttttagttttttgagggacctccatgctgttaaccataatgggggtaataatttacatttccaccagcagtgtataagagttctgttttctccacatcctcatcagtatttcttattttttgtcatttgatacttgtcattctgggattagatgttatctcacagtggttttgatttgcttttccctgatgatcagtgatgttgcacattttttcagatacttgttggccatttgtgtatcttctttttcgaaatgtctattcagatcttttgctcattttagtactagattatttgtttatttgctcttgaggtgttcgagttcttgtatattctggatattcgttccttgttggatgaatagtttgcaagtattttctcccattctatgggctgtctcttcactctgttgtttcctttgctgttcagaagctttttagttttatgtagtccaatttgtctatttttgtttttgttgtctgtgcttttgaagtcttatcaacaaaatctttgctcagaacaaagtcctgaaacattttctcagtgttttcttctagtagttttatagttttgggtcttayacttaagtcattatattttgagttaatttttgtatatggtgagagacagggtccagttcactttctgcatatggatggatagtcagttttccccgcactatttattgaagagggtgtcctttcccccagtgtttgtttttggcagttttgttgcatatcagttggctgtgaatatgtggatttatttctggattgtctattctgttccattggcctttgtgtctgtgtttgtactagcaccatgctgttttggttattgtagccttattgcattgtttgaagttgggtaatgtgatgcttccagctttgttctttttgcttaggattgttttggttattcggagtgcagtttatcattatgcaacgactttctttgtctcttcttattttcttactaaatttaaagtctgtttgtcagatacaaatatagctactcctacacccttttggtttccatttacgtgggatatatttttgcatacctttactttgagcctatatgtgtctttacaggtgacacaagttttttgtaggcagcatacgtccagatcttgtgtttttaatccatttatccagtctgtaacttttaattggggaatttaaaactatttacattttgattcagactctgcatcttaacaagatcctgaaatgatccatacgcatgttaargttggagaagcactgttgtagacaatagcataggttaagattagcatgtggagcaattttggtaaattgatcaattcgaaacataaagatggaagttttaggaaggaaaagtatagtataaagaggggtttaacatgaggttaatagtagctaattacaatttaaattttaaattaatgttaaatttgccttgagatagacaattagcttgctgccacattggaatttataagtaatgtactagatctttaagctaatgctattataacctatattaattaggttcttaaagtttttaaaacatctttacagtataaagaaaaaaatgcatgtctgattattttgttttttgtacatcatttataaycattatcatcttacaaataagcatacagccttagacaacttaagtaatatagtcagtgtcctaccaaaagtgagttaatggttgagccaagccatgaacaaaattctgattctagaacttcttttggaaaagttcgaaataagtataaattctcactatccctagtgaggatagagtaggaaagaacggatcaacttcagcttaacttaatgtagacttgatctttttggtaggygtagatttcactttataatgtttgtctgtaatttcataatgcttctctgaaaattccatttaaatttggagttaggccccactctattaatattctgttaaaagcatctgacttagtatttaggaggtcacaaattgtattgtaacagaggtgatagatgacatttatggatattttaaaattatcttagataattccaatgtacagcctgctaatgctttacacaggagtttctgattggacttttcactctgctctggtttcaggcctttatgtctttaagtctttaattttgcagatgaggaattccagagtatctccagagaagttttatagccagttaatggcaaagacagtttatggcaaagtcaaacccaggcttcttcttatacaaaacccaagctttaggccatcatgcctagtgagagacgtcatgagtgaacattagcttttgttttctttctcctccggcttctaactttcttctctctcccagcatctaagaaaataaattctttcttgccaattcccccattaacatttaatttttgttttgaattttatttactatttttagaggttctagaatagaaggaatttccctgaacaccactctgccatgttgctctatgtgggggattcttcaaagtatttataaatatttatttttatttatttatttattattattattggtttttgtttgtttgttgcttttctgagacagggttttgctctgttgcccaggctggagtgctgtggtgcaatcttggctcattgttgcctctacctcctgggctcargcagtcctctcaccacagccacccaagtagctggcacaacaggtgcacaccactgtgcctggctaatttttttgtattttttgaggagacggagttttgctatgttgcccaggctggtgtcaaactcctggactcaagcagtctgtgtgccttggcctcccagagtgcttgaattataggcttgaggcactgcaaccagcctataatttgttttgycagatctgatataaagaagtaggagaaatctttgccatgctgagttctttaaagtacttttaagaaagtgtgatgcttggcatataggaggtggtgaacaaatggtagttgtttttatttttggcatcattaggtcctttttttggttatttcagaaaaaatatttgaagatttaaaagttgccaaaaatgaacagatcattcctgggtgtttttcagcttaatcatttggggttttaattaaattagttatttaaataactttttattaaaatagtttttcaatttttaaaggtttggataaattgagggtttattatgtctacatttatgtatttaaaaagttatcctcacttrggctttctcctataaaacatgtcatatagaataggtttttggacaaagtttaatctattcatttattaatttctgtaccaaaatatctgttgggtagttactatgcaacaggcaatgtacaaaactctggagaaatattatgagcaagatgtgaatatttcttgtcaatggtaattctagtagaagacagaagtatcaagcgagtaagcatacagttaaatgtataaatattatttgtcataaagtgctgttaaaggaaaataatagattgttgtgagggagtgattgggaaaagctttatttttgacttgtggagtccacatttcagtgcagatctgacttttaagtaagaatcttctagacacaaaagttctgtgtaggggaggaatattctagttataatgcagagtgagccaaggggaaagtggttataataagattggagtggtaggcagaggccagaacattgtagcgccttcttagtaatgttaagaagtttactttttattttaagtgccaagagtagatggtcaaaagtttaaatcaaggaggtgacatgatctcttttacattttaaagtaattactcttccactaatgcagaggaagaatgggagaaaacaagtggaaatggggaaagccttcaggaggcagctatagtagtctaggtaagagatattgatggcttgactaggcagctaatagtgtagactggaagaagagaaggaaagttattcattggacttggagatgtagaagatgaggaaggaaggtaatggcagatacttcctagattcttgacttgaatagttgttttccacttagtaaaatgcgaaaaagtggaggaagaataggttttgaaaagaagtcagaaattcagtttggatctgtaaattttcctattcatttaacagtgtagctctcaaggcagacaattgcatactataatagcagtaacatctaatgcttattaagctttttctgtgtgaatagcacttgatacggtttggatatttgtccgctccaaatctcatgtcaaaatgtgatcccaatgttggaggtggcacctggtgggaggtgtttgggtcatggtggtggatccctcatgaatgacatagtgccctccttgtggtaataagtgagttctcattgttggttcatgtgagagctggttgtttaaaggagcctgccacctcctcctaactctcttttgctcgctctcaccatgtgatacattggctccccctttgtcttctatcatgattgtgagcttcctgaggcctcatcagaagccaagcggatgctgacaccatgcttgtacagcttgcagaactgctagccaaataaacatattttctttataaattatcaaattttagatattcctttatagcaatgcaaaatggaccaaaacagtactgttctgagttcttgtaaatgtastaactcaagccttacaacaaacatgtgatacaggtacccttaatcctcattttaaagatgaggaaaacgaggcaggatgaattattttacttaagctagccagccagtagtgtkgtcatcaggactcaaactcaggcgttttggttcttgagcccatgcacttcaaaccacttagctatagtgcttatgaattttgagtgtgaggaaaggtcaggtttgggggtatgaacatttttggattcattagcctatagataatatttaacataaactctttattatatattaatgtgctttttaaaaaaaaatttttttttgagacggagtctcactctgttgcccagggtggagtgcagtggtgtgatcttggctcactgcagcctccgccttctgggttcaagcgattcttctgcctcagcctcctgagtagctgggattattggctcgtgccaccacacctggctaatttttgtagttttagtagagacagggtttcaccatgtttaccaggttggtctcgaactcctgacctcaggtgatccgcccgcttcggcctcccaaagtgctgggattacaggcctgagccaccacacccggtcagtatattagtgtgcttttaaacaatgtttatcacttactaaaataatatggcctgtgttttcaccatgattagagcattattatatacttccactgagatatccaagtgagccattaataattatgtatacatcatctacattctgagttcattgttattttttaaactttgtttaaagttgaaaccatttgagttatttgccatgtattgtcacaaagattaatttaataatacaattgtaatccgcatagccataatttttccctcataagtctgttatctgtgccttcatttcttgtagtctttcctcatttctaccattatattgaaattattttgctaattttcagtttttccctttctrcatccaagatccttttctttgattctttatgctctgtgcactgttgtttaccatcgtccagtccctcctttcatattctcttccttgcattttaactgctgccatctcctttttttcttcttcaccaatcagaatgttaattgtgaggatctgctataagcattaatctactctataaagttttccctgatcattaaaatcactctatgtccctgtcactctttctgcataactaactttggcatgtactaacgatactatattatgagataktttatgtatcctttctccccaacttgtatactacttgtataccctttctcccagacttgtatattactgtaattacacatttaataggccacttaaagttgtcccatagttcrctgcaattttaaatttgtcttttttattttagattctttttttggaatggcttcagtttaatcttttcatctgctgttaattccttctgctgtattttttatttcacgtgttgtagttttcatctttagaagtttggctcttttttatatctgtatacttaatgtcttgagcatgtagattacagcttaatgtgcttgtctggtaattttaacatcagtgtcagttctgggttggttttgatcgattgattttttttcctatcatggaatgtattttcctgcttttttgcatgcctcaaaatgtttaattggatcataggcattgtgcattttgttggatactggataattttgtcttcctgtgactatcattgaggtttgttctggctgtgatgcaagcaagtattttgatcctttaagttcttgattataagatttgttaggcaggattggagcaacattcagtgtagggataattattccctactattgccagagcatctgaatactctacataatgtcttatgagatttttcaatttggctggtgggaacaggcactattactggtcctctgtgagtgctggatactactcttatgaatcaggttcgctgcacactagttatcaacttgagtttggtgagatggaatgtctttttatgcaacaagttacataagacagattcatgacttacaggcaggcagcaaaggaccacagaagcctaggattcattgctggttgcccacggctcacggaaacttcatgggacagatggagttttgactggatgcgcgtcatcttcactgcaattgagggaccctggaaagttgtctaccctaggttttatacttcggggcaatatgatactctgggctaaagctctgaaggacatcctgtttctaagggggactggaacagaacttgggctattcccaccagtccctccctttctcagaatattgcattcccatcactttgttattctcaaactgcaagtgagaaaaatacggaaagctgggctcttaaggccgtttggagaactgtcctgtagttctcattatactttcagatagatacttttcccagcctctggtaatttctttacacataggatttgatcagcactcagctgaatattcaaggggaatctctagatttccaggcttctctttgtgtaaatctttcctctttagtactctgccctgtgattctaggtgccttggttacctggactttccgctctgtttccatagctcaggagtcagctggtctctgcctgtactctccctctctgtgctgtaggcttgaatctctcaagggagtagggtggaacagacatagggctcwctttgttccctgtctcttaggcatcagcgtcttttatatcctgatgaccagcgtcctgaaaactgttacatatgttttgtttccttttgtttgtttgtttgtttcaggcgggtgggcaaatcagtcgcttttgctgtatcttggccagaaatggaaggagtatatttgctgttgctatttcaaaagcatccagagattgataagagaaatgggaggaagtcatttttaagcctagtgtaatacaatgtagcacttattttagctttctacttctgtaagattttctcaaaaattcaagaagtaaaattctactatgtgtgtggaaataaaaatagacttaagataattttttgtcttacaagttgtacttctgctatctttactgtaagatttaaagtgacagtcttcataaggtccaggtatgccataggaacttagtgatttgaccaattgaatagtaatggtcccaaaggtatatctttaacatatttcttcaggacttcagaattaaggttgtgggtaaaataggtccaaggttatagccagtattcttacatgtagtttgaaagttttctagtctctcatctaaagtgatgtaacatttattttctcagaatgagtttacaagaggcgttaacaaatttaagtattctttcctattttatagtcgcaagttctaattgggaacatatatccatctataataatgatatgacgtttttgaaatggttrtctttttaaaagtttactttatttgaataattgctcagagaaagaaaaatatgccatgtttttaggggtgttttagtaaaaaattatttggaacttcagttaacatgccgtgtaagagtagtacagtacatgggtttgaactgcacacatccacttttacacagaatttttctcaaccgaatgcagctaaagaccctgtgttcctggatgcaaaacctttgcatacagagtgccaacttttcttatatgcatgttccgcaagaccaactgcagggcttgagtatatgcggattttggcgtgtggggtgtcctagaaccaataccctgtgcatactgaggaatgactataattttcagatactgtggggcacactgtaagttgtaaccttaatttttaacactrttattatgttaatgtcttcgtatattaattacagttatatttttctttaattgattttatttaattgatttataaagaggtgttgagagtgggagatgtggtgtgggtattcagagaatttatgttgctgaactgattggatataatgttttggttggggttgaatatagtgttactgataactctttttctcccttccctaaatgttttatgaaatataaatgttctaattgtacttaattattatttcaaataatagacgatctttcttaatttaacatagttgactgcaggctgtgatagatactgtgtagcaggtgacaaggttaatagtccaatttaaaccttggttaggtagcaccagttgaaagttaataattagttgtggaaggctaaagaaaagctgggtcagttcagcagaagtcagacttgttgtctgagaatgtcagcaggggtggtacagtaggaagaggtcagagatacagtgataaatagaatatggagatgaggtagcaccttgtccaaggtcagaatcatgacagtagaaagagaggctaacttgatgatagagatttgctgcagattttaatggaggtgatttaaatttctctcagtccaactcaggatctgtctacactgattttgaagcctgtggcccttagatcttaagagatctaaaccagtatcatttggtttatcagagtgtaatctgggacagttttcctcaaggtaaatttgatattcttcttgagccagttggacactgcattcttaaatattagttgctagtatatgtatgtctttcggttatgctttgctaatttattgagaacattgatgtattttttctttgtctttctttaaattattgcctttggcacagtgagctttaagttaaataaaattctttgcaaatcattttttaagagaatcaagcctataaaatatgaataacatctaaaatactaacaacatctaaaatactagttgtataagctttgagcattggatatgtatagtaagctaaatacacattgatattagattgacagtagttaggaaaacaaaaccttcatgagtttgttctttgaaaatgaccagatatctgacactggaattaagacatatacttgaaagcatatggctaagtcttaatttcttgacctctaatgattccgtactttatcattggtcagaaatgagtatggcctacatttttaaggcatttggaattctaagttggtaatggggaaaaacattagttaatattgtcctttaattttagataatagtatatagtaaatgtttattgatcagcatttatatctgtatatttacacgcatgcacacacaacacttattctgtgtcctagcgttgatattttcaaattgcttttcacgtaaatttgttgtttctagattcaacgtaaataaatgctttgagaatcaagttatttctttaagagtttccagttgagtaaatctggttgaaagcagagtttgcagagcataataccagttggggttttatgtgatctttgtcattatctagaaccttatctcttccctgtccttgcactccatccaaatgtttatcaattagtacattgaaagtttttcttctggcttttttcttgttctagacgtattttgcatgatactttaccattaaaaataaaatacctttttgtttgcagtagatttagattcacagcaaagttgagaggaaagtacagagttttttaatatatctcttgcctccacacatgcgtcatctccatcattatcagtattcctaccaatgtggtacatttgttaaaattcatgaacctacatagatacatcataattacccaaagtctgtactttgtattagggttcattcttggtgttgtatattctgtgggtttgggtaaatgtttaatgaaatgtatccatcattataatggataatgccctaaaactcgtcatacttcctccttctccagtctccaccctctggcaaccactgatctttttactgtcttcatagttttgcctttttcagaatgtcataaagttggaatcatacagtatatagccttttcagattggcctctttcacttagtaatgtacatttaagttttctctatgttttttcatggtttgatagctcatttttttttatagcactgaataatctattgtctggatgtaccagtttatttacccattcacttaccagaggatgtcttggttgyttctgagttttggtaattatgaataaaggtgttatcaacacctctttacaggtttttgtgtggacctaagtgttcaattccttttgagtagatcccaaggaatgcatttgctggatcaagtggttaaaattatggtaattttataagaaactgccaaaccatcttgcaaagtgcctgtaccattttgtattcctaccagcaatgaatgagaattcctgctgctacacatcctctctagcagttgatgttgtcagtgctctggattttggtcattctaataggtttataattgtcttaatttgcatttcccgatgacatgtaatgtggaggatctttttatgtgctagtttgctatttgtatatcttctttggtgagatgtctcttaaggtctttggcccattttaaaattgggttgttttgttcttattgatgagttttaagaggtctttgtatatttttgtaacagttctttatcagatgtctctttggcaaatattttytcccagtttgtgagtcgtcttcttatttcgttcaccatttcttttggagagcagaagttttaaattttagtgaattttaatgaagtctagcttattatttctctcatggatcctgcctttggtatatctaaaaagtcatcgccatacccagttacctaggttttcttttatgctctcttatagtagttttatagttttgcatttcacattaggtctgattcatacagagttaacttttgtgaggggtgtaaagtctagattcatttttttgcatgtagatatctagctgttctagcatcatttgttgagattctctttgctccgttatattgcttgtggtttttttttttttttgtcaaagatcagttgattatgtcagtctgtttcttagccctctattctgtactattgatctgttattttgccagtaccccactgtctttattattgtaactttgtagtgtatgttgaggttggaggttgggaagtatcctccaagtctgttctccttaaatgttggttggctataatggctcttttacttctccaaataaactttgtctatcatcacttattagttccaataggtttcttgtcgattcttttgaattttctgcaagacagtcaacgccatctgcaaacaaagacagttttatttcttctttagtaatctgtgtaccttttatttcattttcttgtcttactgcattaggcgggacttctagtatgatgttgaaaacaagtggtagaggggacatggacaatgctttttaaaacaaaacaattattttataagcatttgtttgtcctataaaattctaattcattttccaaatatgttttctattagaaaactgtagtctgtggaagaccatttgacagtagggagaattatggcctttgtaatgacagcaagataaaataatgttgtggtagtaatggcaattaagaaaaatgttgaatactgaattagaataaaaaatagagatgcttcatctaaggacaaacaggtttgattaggatgtcagtaggcttagagaatatgaacataatcctaacccacttaaaggaaaattagaattgggtagtgattcttagtttattttgtatgtaaatttctcttccttggtacatttttatcattattgtgaccgttaaatttgttaggcaaatagaagatgctgttttattcttgtttgctttgtcttagtgggttacagattaaaataaattggatgggagataggggagagggataaacatacacgaacatttgaggaggtaactcagtaatggttataagatacaaagtatgaggtactgttttgccatgtaagttaagaattaaaatcactttctcttcttgcaccctctcaacaactagttaagctactagctgtagattctaaactttttaatgtttattttgttagcattattgatcttgcttataaaggaattttattctttgtagattggttaaatgtgctatcagtgtaaaattgcttaataacgatagaaatggtgaacccaaattgcataataataattgtacatatggagagccaatgtgttcagatactgtgctaaatactttgtatttagttaaaataatattttttttctcagaagaaatacacaggttcactgaaatcaagagtacaagtaattcagagtgcaagctataacactagagaactgtaaaatatgaattaactttgttaaaggtcagcagatttgttacagtatccataggtagcaagcttaaggttagtctgttacctaaatgattctagtaggaggagttttaaactcatttccaaagagtattattttgacaggcagtatttgaatttacttattatcatggctgggtaatttatgtttgaatttgtcagtctataaaatgcattgtttcccccccgttgcctataaaaaaccatttcctcaaactgttctgtgaccagtatgcacctgtagtagaaatggaaggcccaagtgtctaaagcaacgggtttatagtttgaatggatctagggagagatccaggcacactgaacaagaaataatttattagtgactcccttctagtggcaaaggctggcaacccaaaacatgacagcaaaactgagatgctttctttggagaatttttggttgttttagaagttaataagctggaggccacacagctgatcaggggtagaaactgggttacttccataattatttatatttaaatttgttacctttttcttaagtttattacctatttataaaatctattctgtagcaatagggscattggtttattattaggttcaaggcaaatcttaggaggctgggaaggaagtaaagaaatgtacagtggtattatgtatagtaacaatggttctaatgtaatgaatggtattaagagctttcctgagtttctgaagtaattatgggttttgagattttgtggcttgctttctaccagttttttatggatatatttgtatcgtgtgtacatattatrtaagaatatattcatataatattgtggttatttatgtattttttttttagtttccagaattaactgacacgcagaactagcatttatttgtacattataatttgtatcaattgagcatccctgatctaaaaatacgatgtctacctgaaatctgaccctaaacccaaaactttgtgagcactgacatgatgctcaaaggaaatgctaactgaagcattttggatttcagatgttaagaataaggatgctcagtcagtagccatcctgaaaacattccaaagtctgaaaaaagtctgaagtccaaaatgcttctcttcccgagcattttggatgagggatactcagcctatatataggccttcctttttgaataaatctattttcttattgcctgttgttcatgcagaactatttagcttttgtggattctagcgcagaatacatgattaaagtttgatttgtctggacaaacttccatcatgaattttaatacagttatgaggaaaaatactaaataagttttatttccccacagtttatcaaatgggttgtactttttacatcttacattttacatcaacttgtaaaaagtattgtgtttatttagaggtgatttctcttggtggaaggaggaagtaatgcagagctgtgaggtaagtaacatggggtttgcagtcagacaggcacaagtacctktctttgtgatactgtgcaaattgcctaatcttgttgaatggagttgtaataggtgctctctctttggggttgtgaagattaaaatatttatatgtgtgtgtgtgtgtgtgtgtgtgtgtktgtatatatgtgtatgtatacgtgtgtatacatatgtacacaaaatatgggttgtatggaacctaatatgtagtatgagtttaacttagattagcgatttttattatcacatgttattaattgtattccttttatacaaagaaaaaaggaactgaaagtgatccatggaaaagtaaaagtagattattaccttgtaasataaataaaaaataaaaacctaagtattaataacactttaatgttagtagatattttacgatatcaaggtagggaaggtcttttgaaataagactgagagaagtacaagttataaataaatggattcaattggaccacagtaaaaaaagaaaagtctgtgtgacaaaggagaccataagtaaattgatatgtcaagtcctagacagaagatatcatagttgccacacatgtagttaattactaatacatgactagttaattaccactaaagaactactacaaattaataagaaaagagaacccaattgaaaaatagataatctgatcagagtttatcactggaacctgagttgttaataaacaatatatgtataatgtcattaaacatcatggatatgaaaattagaggaatattgagatgctatttgttacttttcatcctggcaacagaatgcaaaaagtctgacagtgttagtgttgataagtatgtgggaaaatgggaacccacatgttgctggtaggagttagtttggaaaaacagtttggcaatatcttgtaattggttagtaagtttttgtattctgtgggcgtatttgacagtctggtgaatgaagcctgtgtacttctttgcagaaaaattttttaagtacaatatataggattataaaagatagtcatattgaaatatcattattacaatataaaaatatgatatggtaatatttttatgaagaaattttataacaagaatttagtgacaggtctgatagccattacaagttcaaaatgatgatgaacatgaactgtgtcttgagatatcagcaatgaatggaatggaataggaaagtacctgcgattcctatggtttaccaagtcacagggactgctaattctattttttttttgcctccacttataactgaaatgttaaattttacagacttatgtaaatgaagatgtttttcccctttttcaagtttatcacctccttgagttagaatcatagaacttacagatgccagtttaagaacccttttagagtgacttttactcatgaataatgataatgattctattattgcttattagaaaaatgagaaagcctatgtgaccattattaagagaaatggaaaaatgtaatatattaatatgatggggtgccctacagcaatgcagataaatgacttacctataagcgtcaatatgcagaggtttctaaaacaaaagtttgaattaaaagtttcagtatgatattgagatagagtattatgcaaattaaagacatatgtaacattttattgtatggtttttgattttatgtacctgtttatgggtgcgtctttatacacataaagatagatttgagaaaaacagtgtttttagtttagtggaaaagagggggaaagtaagatgggataaaggaattcagaggtacctgtagtattttaattatttatgttaggaaataaaccaaatagattgcaaactaacagaccttattcgatgataattgtcattgatgagtacgtgggtttttgttttattattatttgtgcttttctgcattaaaatagttccccaaattctcaaaatartagttattaacaagaaaatattttcttataattattgtaaatattttaataaaaatacaagtggcaccaagatagattatcagttgcaaaggggattaacttttgtcatttgcttcaggtacatatgggttactgaataattaccgaattaattgttttctagttaatgccaagtgtttcttgccttttggttttctatttagaatgtcaaagtaagcctttgaacagtcattgatatttatggtagcagaatgttaactctctgaatatggttaggactgtggtattctgcagtaacttaatagccctacattttttctatatttggcatttttattaccagagaatctccaaactttatcttacaagacccaggaaaatggttttatttgttgggcttatattggtttcttgtatctgtttttctctaatggttcactaaattagttttgaaatatctgggattgctttcttcagttttttggtaaagagatacataaaactcyggttattgtagagaagttctgatactccaggycatttttactgaaatgaactaaggtgttagtcagtaaagatgaatgtagtagtgactgtggaagttagaatataatgaaacatcctcattttctcaaatagcagcctgaccccaagcgtgaagtgagcatcgcttccaaaagagtagaatcaatcaatagatgggaagattagtataggaacagcaaagaagcacagagtaactcatgccgctacctggctttgtttcatatcttttcctagaggaatcaaaattacttgtcttttagtcactctttttttgcatgtctcttaaactgtctctaactggcaataactgttgttttattgtttataaagcaccacaggtaaaaatttcaaatcacatgattcataaagtaaaaataaacataaccatttatcttctcctgtagaaggaagccattattgatttgctacacagttgacccttgaacaacatgggtatgaattgcgtgggtctatttatacatagatttttttcaaatcaatatattggaaaatttttttaagatatgtgacaatttgaaagcattctaagatggactgcattgccttacaaataccaaaaaaaatggagaaaaaagtctgtcaagagggcataaaatgtatatacatactagtctattttcatcgtttastaccataagatatacacaaatctattataaaaaggtcaaaacttgtyaaaacttagacacacagttacaaatcacacatgacaccacttgcagttgagggaaatgtaaacaaacataaggttgccatattaaatcacaactgcataaaattaactgtagtacgttataggctactgtcataacttcgtagctgcattccgttgctattagggtgagcttaagtgttgcagtagccacttaaaatgccttatgacactgatcatctccatgtgagcccttcatctctccagtgagttgcatattgcagtaaacagtgatcacccgaggttctcctgtatttttcattctgtttaatgtaatagtgtaaaccttgaataacaccatgggacgcaaacaaaatgccactagggatgctggaggtgctcccaagaagcagacaagccatgacattacaagaaaaagttgagttgcttgatagataccatagattgagatctgtacctgtggttgctcccattttaaacagatgattcatcttgtaaacaggtgacagaaacttatagtatgagtaaatacaatacagtactataaatgtattttgtcctatgatttctaaataacattttctttagctcactttattgtaagaatattgcatataatacatgtacaaaatctgtgttaattgactatgttattggtaagkcttctggtcagcagtaagcttttagtagtcaatttttggggagtgaacacttaacacgtgatttttgactgtgtgggtgcccctaaccttcccattgttctatattatttcaaatatttagcatgtawgtaaaaaagttaatgagtgaataggcacacacaaattgtggatattcttgtaggtaagtctgtttcatcttgttaaataactataatactgtcttgtttcataccatgttatgatgtaatcagattcctctctgtaggcataaatattatatccaaatacttggaattatgaacagtgcttcagtgaatatccttttatatttacgtgtgtactttgtctgattatttctttaggataaattcctagaaatggcattgatgaactaaaggaaacacacatttaaagcttcgtatgtattataaatgtgacttcttgaaagatgttaccaatgcatagccatattgtatcccttggtacagttttaacttacgttttccagtggtatttttaataaaacattgtgtgtgtgtgtgtgtgtatgtgtatatgtgtatatatatacttataaaacaaagtacaatgttttataatattttaatccagttaatattagcattcaacatggatggtatcttatgtacagactacccgcaagtttcagtagtaagcttttaccctgtgctgttctctctgatcataatcccaaatgttttaaaaagggcatttctcctgccacaaatggtkgggggagagcgtctgaaccaaggaaacgtgtggaccagaaaagagctgtgttaattctatttctgtattttcagtacatttttttcattacttaattagttacacaaatatttatttaatgaggcaggcaccggcctggtcactgggcatacagtgatggtagagacagttctaggctctcaagaatttataatttagtgatagaaacttttaagtggctcaaaacagtcaactcctttacaaactacagttataatacatttgtaaagtgtgtgtatagtttacatacatttgtaaaataatttagtgtaacaaagcaaaatagaaataaagatgagaaaaaattttattgaaacatgtcaccacctacaaacaattgtcattaagtaaaatttacttctcctctaacatttcattatgaacttctaaaacataaaggtaagctgagagaatttacactgaatacccagatatcgactacctagattccacaattaacaattgactgtgcttgctttatcgcaactccatcttatgtatcagcaatcattctgtctttttaaatgcattttagagtaagctggagaaaagtgtccttccttcaatatgcataacatgaactattgttttaagcagcactgtgtttcagttaaatctgtattgattgactatatgctattaaaaatgtagaaattttgtacttttacatttcctccctaattctcttccctgtcagcaaatatttgataaattactttgtctagttatggaacgtaatgaagtgtcatatcttgaatgcccatataatttacctgaactggaatatttttgataagcgtgcagtgatacagcaagtgcagtttggggtttccttagcaaaccagaatggtgagaatgtctataacaataaatgccagagtagtttattcttggttttacatttaaatgtatttgcatttaattagcactatattcacatttggcttttaccatagcttatttcctgagttcttgattttgattcacctcttggctgaattttatccatagcttctcttttcctgagttccttattttgattgagttcttggttatattttatcctcaagaggttcctctcttttccatgagtgtttaatgtgtactgaattccttagtttttttttgcttgctttgttactttatattggtgctttttgtaaacaataaattccaatataaaatagttgtttgtcttatagggataaattgaacaatagtagggacatcctagggctaggggtgagcctagaatcttatctctaatattactcagtcttccacatgaagtgtgatgtaagaagtttcttcggagatttttacctttgtatattgatatggtttggctctgtgtccccatccaaatctcatcttcatttgtaattcccatgtgtcacgggaggaacctgatgggaggtgattggattatgggggtggtttcccccatgttgttcttgtgatagtgcgtgagtctcgtgagatccgatggttttaaaagtggcagtttttcctttgctttcacttcacttctcttgcctgccaccatgtaagatgtgccagcttccccttccaccatgattgtaagtttcctgaggctctcyagccatgcgtaactgtcagtcaattaaacctctttcctttataaattacccagtcttggatatttctttatagcagtgcaaaaactgactaatacatatacctttgtacaaaataaccaaaagaaatctttgattctactcccaaaaaacttgacttgctcttgccatttggaagaaacttggtagaattaaacactgtttaagttgatgaaaaacaagcgttggaaattttttaaagtacatttaaaactttgctcttggctgattttctgttggattctattgaatttttctttgttttgacgatgtaagcgttacatattttagtgactgatttgtgtgaatcaagaataaagtcactgaaaaaattaactcaattttacaatttatgagtatagttacggttttgttttgccacattctgttagtaaaagtttttttcagctgtgacacataatatgtggccattaatagtgaagagttacacacaatgacttctaaagcagtgcaagataattttatgatataatgtattactacaatagagtacctgctatactcatttacactggtaatagtcatcttgtctggatctgtattcccaagagaggcaggccagatggctgtgtacagctggaagtagattttcttctaagcttttaacagctrctctcatttcttatatctggtacttgttttaaaatgagatatttatttataaatgaatgtccaacagaaggatatgaaagagttcaagaaaaatggtgacagaagctaatgcagtggtggaaaaaaaaatgggaagctcatttgacccatttgatgactgtccctgattaaaatgacttcatattttgagtcttcagagaaagtatcatgattcccattataatgatactgtctcttgatagtagggtattgtacttaagcaattttttagtgaaaaattgtcaggaggacaacaaacattwaaaaaaaaacatgttttcactgtacattaaaaataaaacagagtaactcccaaaaccaaaaaaaggccattttcaactatttacatgactttatgacctatctttatcaataaacatacacttttgtgatactaatatattactatgaatatattaccttctatctttccacttactgttatgatataattttcttactagtcaccacatttcattttagtctctggtattttattgtattattatgctctttatttcctagctgtttttatttttgttgctgttgatcacataactatgtttatatggtttaactatttttcttttggaaatttttaaggtatattaagaaaggtatgatgaataaattataatcagtttaatgtattttgtatygttgtttttatgaggggctttgcgttttaggcactggatttatttcatagcatactttgaaatccataaaattccatacattcattgatccgattttgttattaccacaagtatcaaatgcaaaatatttcagtatactgcatgatgttttcgctgataaaattaaggtatagcaacatctaacattagaattcttaaaattattgctgcaagggagtagttaagtttctcatggagaaacatttctggtattttcaatgtagaatttaatgttgatgtgtttctgtgaattcactgcttcctttattaatttttatgaataaggaaatactagcaaacttgatttattttaaatctttggaatattaatttaacatctggcaacagcaattcttaagttcttattgttatactgattttatatataagtgagatacatatgcaagtttcggaaacagttgttacttcgaaatattcttttttgcctttgaaccagagaataaatagagcaaagagactggcaaattgaagtaaacccctttaaaaaagtgacatttgaatagggctactgtgttagcaattcctatattagagcgtaaaagttttacaaattttccattcattcagtagaggtatagggagggcttgagggcctctcaggagccaccagtgttcaggatgctctccggggtacaaagatggtcaaaatgtggatctctcctcagggaaaatttctgaggagagttcaggttgatagacacataactaaaagagtgttactggacttatttttaatatgtctctagaaaaagttcacttaattgaatattgtagtaccgtccactgaaagcttctttttcaaaaaaagtgtgatattagaataacttaatttctctatttctcattagataactttacacaaacaaaaggtctttaggatcttcccagaggtggaattggtttgggattttacagtatttctttctttaatttttatagtgttctgtatcaaatatttcraagaacttttttgttgttgctgttgttgtttttttgagacagagtcttgccctgtctcccagtctggagggcaatggcgtgatctcggctcactgcaaatcccgcctcccaggttgaaacgattctcctgcctcagcctcccaagtagctgagattacaggcacctgccacacatccagctaatttttgtatttttagtagagatgaggaggtttcaccatgttggctagggtggtctcaaactcctgacctcgtgatctgcccgcaccggcctcccaaagtgctgggattacaggcgtgagccatcgtacctggctacctttttgcttttgaatgtaatgataattgttttctgatggattgctgattacattatctctagagagaccatgatttgctgagttcttaactgattaacctcttggaatttttgctttctttatggcgtgtgtgctgtatgcattttatatttctgataaaaatggtgtatttgtttaatttaytgtatagctcattgtggtcttctgagtgcctttaaaggtagtggtggtctttactraactatcagtttgtaatgtagatgaggtggtatagtgcttaatctctgattttttggttcctagaagcattaattgccctttatatatttttaaatctgttaagtatgacataatattaagaaatatgaatacagatttttaagatcgaatttccaacatggaagataacttttctactaaatgcaaaacgatatgcatctggctgctcatgtttggtttatcgttgggttttcattgaactccttaaatattagagtcttgaaaagtaaaggcttcttgttctcttagagactcctttaaaaatataagaagaacagaaggggtcatgatattgtttctgtgggttagcagttgataccttcaacatgtacgtcttgttctcattccagatctgcatgctgtgaattactataagcaagttttattatggctattttgatgagtacctgctattcagatagcaggtacctgaataagtactgtatatgtgactggtaaacaaacacgtgaatagctgcccccctggcagaggcatcttggttaaagacatgagaccacatatctttttgccttggtacatctggtcatgttcctagggataaaatgttgaaacaaacaaacaaacaagaaagagtaaaaaatatgagattagtgagctcttattctatttaagcttcactttggaatgaaccattgtattacgtattgtttaatgcaatgtactatttcttgtatttttggttataaattggttattgtagtaaaatgtgaattgagaaaaaatggagtggtgtcataatttggagactggtatatagattatgccagcttgtttattatactgagttgctataaagttaagccttcataaaatrttaagrtaaaaatacaagaaggaaaaaatataagaaagaggaatgggcatctgaacgtattatgactgattctattaacttcattcatagatgtgaccttctaacctttgttttttataaagtaacaaggatggggcttttttgttttgttttgtttttgaagattctaagttacagatttctttttccttttctgatgtgacagatttatggcatcttggactgtatgtcccatcttgtatcagtaagagacaaagccaaccgatcacccactcttcactgatcggaccagtctagacttcagaatcttctgcagtgaatttaaaggagccacaatatcagttaatgttcacagaaacaatatattctttaccatcccttcctgagttggcactaagccgtttacttaagagcagagctacagccatcgcatatcaatataagccatattatatatatgatatatatatatatatatcatatatatgtattttatatgtgtttgtgtgtgtgtacacatggacactttttagtgctagagtttatttgccttaagggcttgagagtaggatctgtcttatttgtgccawatttggggacaatgggattcatgtaacatgtcttacagtgctttttttttttaagtaaatttagcacagtgcttttcttgtaatactcagaaacattaggtaactctgagattgaaggtattaatgagatttaaaaaattcccactgcagataattcttttagcaatgtgatctgtgttgttgttagatcatgacctgaagaaaaggaaaagaaatttgagtgtcttagcatttgtaagatgcagtgctaagagttttccatgcattggcccatgcagttttacaaacatcaagtctcatgagatgtgatggttttatgaaggggaagttccctgtacatgctgtctcttgcctgctgccatgttaagatgtccctttgctgttcttcgtcttctgccatgaytgtgaggcctccccagccatgtggaactgtgagtccattgaacctctttcctttataaattacccagtctcgggtatgtctttattagcagtgtgaaaacagactaatacaaatacatatagcattatctcaggttttgtaagagttgtattatattccatcttatagatatttctgttctcctttaactttaacattccctttaagcatggacttttttgacccaactttcattcttcactgggaatagggagctgagattcatgagcataattttcttcagaagaccaaaagggacacccaaacagagaagtttgaattaggcctttgagatctaatttagagattcactcattttccctgtgttatctcccatgtgtacaggaagtatacatttgtgaagcttctggtgttttgttatttttttttttttttcggtgggggtctgagttaagaactccatgaaggatagaagagaaaattatttttttctcccctaaagacttgagaattctcagattatttagtaccaaaattgtgtttctgagagaactaagtattttctctgcattagccataacacatattattttaattaaggtttctgtttttttaatcacctcatggaaacactgagtctaggctgagatgggggtctttagtattggatgaggctcacttatgcccactagcctttatgtaggtatgttttacatttcttaacatgcactcatttaagtgtatgattaaatgactttcagtaactttagtgagtggtacaaccatcactagaaatcagttttagaacattttatctcttcagtaagatatttgtgactgtttacagttaatccctgttcttaccttgaggcccagacaactgcttatctacttcttgtctttataaatttgcctttctagactttttatataaatgggagaataaaatgtgtggtctgttatgtctggcttctttcagtgaatataatgttcctgaggcttatccatgtcgtggcagttacaagttggcttctttttatttcctagcagtattccattgtgtggacctaccatattttgtctatccatkcaacagttgatgaaaatttaagttttcatgacatttaaatttaaagtcatgcttgtacaaatttgtaaattgccttggacatagtaatctgtgaaatgccggattattattcttttttgctaaggatatagttacataataatttatatatgaaacagactccttgggttagaattgaaatttccaatttactttttatatatagtgaaagtatacaagtacagctattcaggctrttattaaaaagaccaaaaaaaaaaaaaaaaccaccccaaaattcggaaaaggacgcgtagtaaagggaactcttgtacactcatcgtgggaatgtgaattagtacagccattatggaaaacagtatagagatttctttaaaaaccagaaatacaacaaccataatattcagcaatctcaatgatggttatttatccaaaggaaaggaaatcagtgtatcaaagagatacctgtcctctcatgtttattgaagcattattcacaatacccctgatgtggaatcaacctaagtgtccatcaatagatgaatggataacaaaagtgttgtatatacacaatggaatgttattcagctgtaagaagaaatgaaatcttgccattcacagcaacatggatgagtccagaggacattgtgttaaatgaagtaagtcaggcacaaaaagacaaacatcacatgttctcactcatatgggagttaaaaagaaaccaaaaaccagattgagctcatagaagtagagagtagaattacaattattagaggatgggaaaagtaggcaggaggggaggataggaagaggttatttagccacaaaattacagataagagtaataagttctaatgttctataagcagtgtagggtgaatatagtttacactaatatactatatattttccaaatctagaagagaggatttcagatgttcacagcacaaggaaatgataaatgtttgaggtgatacatattctaattaccctgatttaaatcattacatattgtatagtatgtagaaatatccctctctaccataaatatgtataattattgcctgtcaactgaaaaggaaaaaagaaaatacaggacgtttatacactaaaatactacaaaaatgagttaaacccataagtactgaaatgaaaaaatgaagagaggctggttaaaggatataaacatgtagttagatagaaggaataagttccacagttccgtggcttgaacttgtggactcaagtgatcctctggactcagcctcttgagtagctaggaccacgtgaacacaccatgaagactggctcatttaaaaaaaaattttgtggagttggggcctcactgtgctgcagtccaggctggtgtaggaataagttctaatggtcgataacagagtaggaaggtataataaaagtagataatttagtgtggtataggaataggttcagaaatgaagactcttaaagaataaaagtagagatcttgatttttttgctttttttcaatagggactaatttctgttttagaagtttatagtgacatgtatttttatacaaaatttactcctagaaatttgcatattatatatgtgtttcagaatatcaggccaggtgtggtggctcacgccagtaatcccagcactttgggaggccatggcgggtggatcacctgaggtcaggagttggagaccagcctggccaacatggcaaaactccgtttttactaaaaatacaaaaattagcccgtcgtggtggctcacgcctgtaatcagtctactcgggaagctgaggctggagaatcgtttgaacctgggaggtggaggttgtaatttgcggagatagcaccactgccctccagcctgtgtgacagagtgagagttcatcttaaaataaaattaatctgttttattgattttaaaataaattcaaatatgttaaaactatcaagctcaattggaaatatttttcattcattctggctgtgctgtgggtggcaggaaggagagagcgctacaacagtccttgggggctctgacctcgagactccctgagcaagagccctaacaccccttggtgctctgccgttgctggcatctctgagtttttgggtgccgctgcgttcccctcatccagatgtcgatttccaagtcagaagcaggtcgccgcatgcctggcccagccacaggccaagcatagaactgcagttggcacagaatctgggccagtagcatgagaccagcatggccgagtgggcagaatgagcccagcaaagcctgatcagaggcgctgcttgctggccacagagatttccggctagcgaagtggctttgaaagaatcctgtgtaatcagcagacagagggaggaaatagatgtacactaatccactcactcatacaagtctatatttgtttctgtatctatctgtaaaatgtgtgtgtgtgtatatatttttttttttttttttttgagacagagtcttgctctgtcgcccaggttgcagtgcagtggtgtgatctccgctcactgcaagctccgcctcccaggttcaagtgattctcctgcttcagcctcctgagtagctgggactgcaggttcgtgccaccacgcctggcttatttttgtatttttagtagagacagggtttcaccatattggccggggtggtctcgaactcctgacctcttgatctgcccgcctaggcttcccaaagtgctaggattacaggcgtgagccaccgcgcctggcctgtattcctgtttaaaaagccacacattaatatggatgcctccaactcctgtccaacgtcacaatatgcattctggccctccccctttccttatttgtgagttcttctctgacagtgatacaaagccagatgtatatttacttacttgttcaactatggtgtactcattaagtacagaagtggtaatacatacctctgtgagaaacaaaaataacttgagtatgttatttgtgtacagcttctttttctctttggctttaagaatatccagtcaaatactgttttccaaagttatgtttacgttagtaatgcagtcaagttcagttgttaaagtttggtttttattttgaaaccatcctcccaaccctggctgatcatttaaaaatatgtaaggcagaaaccatttttgtgttgtctactgttgtgttatttaaagacaaaagtatgctcaccgaaacctagatggtatagtctactacacacccaggctgtgtggtatagctcctagggtacaaagctgtacacaatagtactctactaaatattgtaggcagtcgtaacacaataagaagtatttatgtatctaaccacgtctaaatttagaaatggtacagcaaagatatggtataaaaggtaaaaaaaatggtccacctgtctaggacactctccatgaatggagctttcaggcctggaggttgctctgggtgaataagtcagtagyggtgagtgagtgtgaaggcctgggacgttactgtacactactgtagactctataaacactgcacgcttaggctttatcgaaagatttttctttgataataaattaactttaccctactagaactttttttaaaagtttttaattttttttaactttttgactcttgtaataacagttagcttaaaatacaaacacattttacagctgtacaaaaatattttctttatatccttattctgkaagcttttttctgattttttaagaagtttttatactttattgttgaaaactaagacacacatacattagcctaggcctgcacatggtcaggattatcaatatcactatcttccacctccacatcttgtcccactggggggtcttcaggtgcaataacagttatggaactgtcatctcctaggataacattctcttctggacacctcgtaaaggacctgcctgaggctgttgtacagttaactttagaaaacaaataagcagaaggagtacagtctaaagataaaaagtatagtaaatacataaaaccagtaacaaagttgtttatcgttatcaagtattatatactatacgtaattgcatgtgctgtgttttcatatgtctggcagccagtagctttgtttacaccagcatcaccacaagcacaggagtaaaacggtgtgctgcagtgttaccacggctgcccttcagtattaggyrgtaagaatttttcagccccattataatcttatgggaccgtctttgtrtatggagtctgttgttaagtgattaacatcactgcgacacatgactgtatttctgtgggttttggcaaatgcagtcatggctctaccactagtcacaagtcggaacacttccattaccttatatgctgtgttttggaagaaattattaaaagtagtttgatacttaaaattcaaagaaaaatcgttttgtggattttactggtattttagcctagtttaagtgagaaatgtgtttctcccttaaggcagttgggatactaagaataggcgagatttcagttcttattttcactatgatttgatatttattgttattccagaacatggatttgtgtttccagcttttaaataattgatatttttcatataatagattgagacttttaaaagaaaaataattcacaaaatgtaatcaaatataatacatgcttttaaaatgctacttttctcatttataattgctctctgctcttcctcgtttaccctataagcagaaagaaaacaatttagaagtgacaaaattttatcctagttttaacattgattagtctggaaagagttttattccatatacttttttttttttccagtcgaagtctgtctctgtcgcccaggctggagtgcagtggcacgatctcggcttactgcaagctccacttcctgggttcacgccattctcctgcctcagcctctggagtagctgggattacaggtgcccgccaccacgcctggctaattttttgtatttttttgtttgtttgtttgttttagtagagatggggttccactgtgttagccaggatggtctccatctcctgaccttgtgagctgcctgcctcggcctcccaaagtgctgggattacaggcgtgagccaccgtgcccggcctattccatatactttttaatctcttgtataggacagattatatttatgaatagatcaaggataatggacatgagttttaattagtaagaaagagagagcattcagaattgtgaaaaaatgactcaattttgccagaaataacagtgcaaggctgaggcatgagaatcccttgaaccctggaggtggaggttgcgatttgctgagattgcaccattgcactccagcctgggtaacagagggagactgtgtcagaaacaaacaaacaaactgcaaattaaaataagataccattgtcgattaacttggaagtgtgtgtgcatatgtgtacaccataaagagatagaagatgaataagaatgaatactctaatctgttgagggtatagtgaatctcacactctaatatattaatacattgcagatagcgttagactttcacactgatatagtgtttgtaaggaagtgtagtcatggtaatgaaaaataccagtttgtcaagattgatgcaaaatgatgggactaacaggcattttgtttaaaagattttttccagaatatttgtaatgggaaaattacatatagttagaattctacatttttcaagatgtgattgtgtagaaattatattttacattgattttttttagtattaaacatgactgtgtaccctgaaatctgtagcacagtggttctcaatatttagaaaaatgacgtatatatatttgcctaattctgaaggaatatagtaattgtatgataactagaagtgtactacaaaaaggaattcagttaaaccaagttaagagtrtgcattcttgtgttttgcttggtttttgaaggcacttgtaacttacctagtcctttgttacttaaataagaactattcctctgtgaggaattttcatttgtgatcaggctattaaatgagtttcgtattaccttgaagatgggaagcatgggaaataggagtaccagactcaggagtctcattcctttcagcatccgtgaaactggggctggcttctttgattatttaaaagtaaagtgaaatctttgaccttttacagttacttactgttttcatagatacatatttggtataaatgggatttttaaatgagaaaaacagtaagattattgtagaaattcaaagagtattaaaagattgtgtgtggtgtgtgtctgtgtgtgagtgtgtgttgtgcatgtgtgtaatgagaaaagcataaaatactgaggtaactcataygtaagtaactttcttagaccagttctcttctgccctcattagtggattaccctgcttgrtttccactctttccatagagggtcacagtctctaaatacttaaaaaataaatatttatatagtttttatcttattattttaaaatgttttcaaggctcaaaagaatttatatagtaagttggttcattgtgtgtattggtaaatactggagactttaaaacttattaaatatataacagttttctgtaaggcaaaaactattaaatggtgcttaacatggaaaataacctcacttcgcttctcaaaattgaaactaagaacaattaggagaagtccttctatgtcactttctactgttttgggtatattgatgaggcagagagataagttatcattttcagtttaataaggttattttactttggaaatatatatctataaaatacacataaatatatgtaaaawatatatatatatataaagtatatttccaaagttatatatatatwtttaactcagactgcaaatatatatatggatttatatatataaattatacataaatattatatatagataaatctatatagataaatctatagctatatatttttatatataaatctatatatgtaaatctaactaaatgcaagtaatttgtttgttttgaggttaagatcaatttcagttgatgccctttggttgtggcaaaattgggtcttttaaaaaaaaaacacagccgagtcattagctgtgatttttctttttcatacagttagcatgcatgcatgtctgaatgttctctctctgcaggttactatgctctttggccagcttactttccttcccttcctcccttccatttctttccatttatcttttttcctgttcaagtgggtgcaaagcactgcaacaagtcttttaccttaactcaggataagatgtctgccttcccttctctcttcttgatgtatatgcacccagtctctgtgagccacttttcctttttcacctgagaggagaggggaaagagattacttttctctctgatttctagagtagagcttggttamatggcacatttcaagcctccctctcctgaccgcttatacttgcttggttttaaaatggcaggcagtttctttgtcttstaggaatacagtgttgtagagttgttaacttctcaggcttgttcaagtaaratgaatgttctaaagataagagcctttttttttccttcctttctttctttttttttagagacagtgtcttactgtgttgcctaagcttatcttgaactccttgggctcaagtgatcctcccaccttggtctcccaaagtgctaggattacaggtgtgagccaccattcccagcctataagagccttctatacagaagctacagtgctgtctcctcccaaacctccctaggaacagaatattactaatagcccagttccacctgtgctgtctrccagtcactgtgcctcccagactagccaccataatgacttttagcacagtacatcagtttttcctatttttgactttaagtagaatcatacaacactcttttgtgtatagttgcagctttgtgtttgtgggggtggttgtgaggttgtagtttttgttgttgttttgttttccttttgctgtgatgtttggctagactagagtagagcagttattatttttactgggcttcccctttctttgtcctttggatagcaagagcttacttttcttgagccttcttttttttwatgtcaacccccattggcattcttggattgctgacttctctagcaastggtctgggatatataaggccaagagaaaacccaacattataaaaatatatgtcctttctatctttctaggagcagaaatatggtcttttatcttttctataaacttggatatcattaggaaaaagaaaataaaacattttatgcatttatatgaaattcaaacaaaaggactttgactctttgtaaatgttaatttctgtgtttaattgcagaatcttttagctgaaaaagtagagcagctgatggaatggagttccagacgctcaatcttccgaatgaatggtgataaattccgaaaatttataaaggcaccacctcgaaactattccatgattgttatgttcactgctcttcagcctcagcggcagtgttctgtgtgcaggtaatttatgtaattaaaaaatattaaaaactattattcttggtttacatrtatatttttatgttcattttaagataaatatatgtaagataaacagttgtttaatagtcaaatataactgtgcatttaaaaataagctgaaaaatcagtgtattttagaaatataggctaatrttcttttattgggggcatgtaaaatattcattgaccagttgcacatataatcataaaaccgttttatcatcttgatatcctgcagattgccttgtaggtcactcagttatagctatggttaatgaagtagcccccttaaatataatcaatttttaatttttaatagagaggactcacttttatctagtgtagcccatttaatttttgataccgccaatgattagaaatttctgtgctgtagaagtaaacagttttaaatgaatgaaatgtttgtctggaggaataaattaaagaaaactttggacaagtataaatacttgtccaaaagtatacaacaaacacttttttaaattgaaatttttattttgaaataattgtaggtacacatcttttayccagtttcctccagtggtaacctgttgtaaaactatagtacaaattcacaagtagggtactggcatcgatacagacaaatgyggaacagctctattactgcagggacacttcttgccctttaaagtcacccgcactctccattgtacttcttacctgtcgaacttgacctctgacctctggcaatcactagtctgttmtccrtttctataattttgtcatttcaagaatcttaggtaaatggaattgtatggtacgtgaccttttgggtttggcttttaaaaatcagccgtaattccctaaaaaaatacgtccaagttgttatatttatcaataattatttttttaaattactgaataatgttccattatatggatgtactgctgtttatttaaccatttatttgttaaaggaatcggggtcgtttctaggttttggctattgcaaataaatgtggtatgagcatttttctgcaggtttttatgtgaacttaccgtttttctgggaagaatgcyrcagagtgtggtggttaggttgtgtggtagtttctatttagttatataagaaacagccaaaatgttttctagaatggctgtatcatttcacattccagccatcagtgtgtttagttgctgcttatccttaccagcatttgctgttgtgactattttattttagccattctgatagatactgtagtaatacctcattgtgatttaattttgcatttccctrtgactaattgtgttgaacatcttttcatgtgcttattcgtcatctatgtatcatctttaatgaagtatctgttcatagtcttctgcccctttctaattggattctttaaatgagttttgagggttcttcatatatttagatactagtccttcgtcagatacttggttttcaaatattttctcccagtttgtgacttgtattttcctcctcattacaggtcttttgcaggttttaattttgatgaagttcagtttattagcttatccatttaaaattatttcttttgttgtcaaattaaagaactctttccttagccctagatcccaaagatcttctcctgtttttttttctgaaaattttctagtttgatgttttacagtttgatctgctctttgaaagaaagcactcaatctgtcatcaagtatgatattagctgtaggttttttataggtggtatttatcaagttgaggaagttgctctatattcctagtttgctgacagtttttatcatgaatgaggtgctgcattaaaaaaattttttttgttgtcactttatgtagtttttcttgcctatggatataatcagttacrttgattgattttcaaatgttgaactggtcttgcatacaggaatggatactatttaattgtgtcatattattttattatgtgttgctggattcagtttgctaatttttttttgaagaagtttgatctaagttaatgatagacactggtctgtagtttttattgtttatagtgtctttgtttagttttggtatcagggtaatattgtactcataaaatgagttggggaatgttacctattttaatttttgggaaatattgtataaaattagtgttaactcttctttaagtgtttggtagcattttccrgtaaaatcatctgggtctggagatatcttccagaaacttataaattacatratccatttcctcgatggttaagcacagcacagtttgtttatatcttcttggctgaacacatgttcaagagcaaacacattttgtactataactgcatgtgccagcattgtccatgttgtatattcattgtagacttggtttaggcttctaaatcattttgagctgtagtggagactgaagttattagtaacttgggtcaatgtaaaaaawcagttttactcaggttaggtggtagaaagggaatgagagtgttctaaaatttctaagaagcatcttatcacaacctaataatgagtgtatgttggggcatggttaaaagtgagtagagaacatggtgagcaaaatattttgaaaaacagcacgttaggtgattttgaattctattactatcaaatttgaggaccagtacttgagagtgtataaacactattgtcagaattgggctagcacataaggatagagtrtatataccttaacgatggcagcagcgggccatccgaagaggccactgctatagttccagctgtggcgagggaggctgggtggtagtggtgggagtggttgcaggagcagcagtggcagtggggagacccgtgtgcaccgtgccscctgtgccctgtgtccccaaggtagctgactgtgccacccccaccctcctgagcctaggcaggacccactcccaggcctggagcctctgccactccagaccctgtccctggtcactgctgtcacctgccacttctacggggaatagggagaagccagacagtccctgaagctatgggggccactgcartggggccaggccaagtcacctgctggtgggagagcagggcagtcaggtatggaggggtgggcagagaggggaccccaaggcggaactgggtctggggcagtgctgtgctccatagagccagtgggagcggggagcagacagtagccctaccctgccgagcatggttgtagccttccaagtcatggctgtggaccagtatatccgtgtgctctttggggcaggaagcaggcagcaaccttgccctcctgggcgcagctgcaactgtccacctgcgactgcggactcaggcatctctctgcactctcagtggcccaggaaggccccccttacccctgcaggcttggagatgtctgcttccactgcctggtctctccctgctcttggtggctgctccagtcttggagcaaggattgggcactgttggagcttggccaggtgtgtgcatgctcagggtagagctgacatgccagccccctgctgcctcagtcccctctggactttcggcataaacgagcatgggagagtggctgaggggggccctgagggaagtctggttttggcctgcaggtgccccttggcaagaacaacctgggcaccatgaatggctgcaggaggcagacaggctccagggtggaagggtcctgatgaaaccccaccttcaagcttgggagggcctgaagcctgggggctgggctgccggtcccgttgaacagagtgggaaagtgtggtactttttcctactctcacccatgcaccagtcagcgcacactatatctggcccataaaaacctcagactcagccagacttgagaagaggatggagagatgatgagacaaagagatggctagctgcagagagaagctgcccaccccagggtctcctctctgctgagagctgaggagacaatggtaggaccagatgcagagaggtgctgctctttctgctgagagctgaagagactataggacagcctgcctggcagaaaggaggtaccctccctactgagagctgaagacttgtcaggacatcctggctatggagaggagctgcccactgcaggttccctctgagctgttcttttgctcactaaagctcctctttgtcttactcaccctccggttgtttgtgtgcttctttcttcctggatgctggacaagaacttgggacctgccaaatggcaaggctaaaagagctgtaatacaaagagggctggaacatgcccctcgcttgccatgttgtggatgaagagaagaagagaatagctgtggccctttggggagcccagacctgggagcttcctgagccagggctgtgactccckttttggggccctgtggtttctggtgtctccaagcttccggtgccactgcattccccagtgctggccggggaagctgcttgcagtccacctgcagcctcacagggagctggtgtctcttccagttcctggagctgcacgccctgctctagccagcatgcctggctgtgtgcagtggccagaccccatgctcactcacacacttcttgttgctctgttcctggtgtaccgttggcaggcatggsatcctggccggtagcgggagctgagtggagactgccagtctgagtggacaaaacgaatccagtgggccagagtgaacctcaggcaaaggtgccactggccacagaggtttccatctggcgaagcgacaccccaaggatcccgtaacattaagggatgctataaagccctactcagacaaaataccttagttgccattttggtatatcagttcgttttcccctaaaaataaaacatttcaggcatttaaaaaatactgtaaatattttaagaaaatctttttttgttcctaaaaactgaatgtattgatttcctaaaatcactagtatagtgaagaaatatttaatcattatatttttataacaatctagaaatattttattatctaagtatttatttcactgttacatataattatatgtactgtaataacataaaccataacatactgttaaatggtgcattctttggatagtattttacttaatgcattttggtgttaaatcatttgttaaatacagacccttaattttttaatgacatctagcctataacaacttttttcatttatttgctttttatttgttcattatagcctattttaagaaacttagcattttaaaagagttttggatttataaragaaagagattgaagttcttggaaaatttaatgggtcartgtcggggtaggatagttagagaagaaagaacaggttaaagttaaaatctattgtgcaaagcagtatagagaaagggaaggtgaggagcaggttcatgacttgtagcttttgtattttattcactgagaagcaatggaaatggaaaggcttaactaattggataaccatgtagcattgaggtaccgtttttgaaactagaatacctaccttcttagtgaagagtctgtagaattaaatgatgttctttcctagtactgagcaatttagtagcaagaaccatgctcctttggaatggtcctgttttcttcatggtgtgaagtggattaggagaatgagtagaaagtgygggtgagagaatatgggaaatatgtagctatggttgcaaagttggatgagggtcakaggaagctagggaaagttgacaaactggttgtgatacagttaagctagatttccacaagggtgaagaacaggttttgtgtagaagtaggatagggttgaaaattagcaagttgtcataaagggtttatttaataagtaacttgctgaagtgtgatatacatgattttcgatggtataaagaagcttgaactgtgagactgtggtaatatctagattataaaattagatgttgatattaggatggtatggtaactgaagaggaaaaaagtgagattatagagggatgccttggagtttgtagatgaggatgaaaatttatattataggatgatatgaatttcaaaggggcgtctgttaagtaattgtggtagagaagtggtcttgaggtctattgttattgagccaggagagctctgtaatccatatgatagtgggcagagtggaycaaagagatttcaaggtgacaactaagatgaaaaggtgaagaggagtttctacaaatatttttcaagaaaaattattcaaattatatttytgagtaataaatgaagcatcagagggagttgtagatgcactgagaaagggaccctgtcatttgcggccatcttgtttttttttttttttttcacgtgaattactcctcctgggtccttctgtgtcagtgtacttttggaccacttctgtaacactgccgtaatctttataattgtttaggatctttgaaaagttcatagttagaatttaaaaatcgtagtactttcctttgtgagacttgccttttttcttttctttaaaaaaaaaaaaagcgaaattttcttctagagttaacttgcatttagattcttcagttgattttccttgcttaaaggctggtgaatgagcttttggcttccttgtaagcccttttagcagataattctgctcttccttcacacagtcagtttattcacaaattttggaattcaattctcacctccctcagtgctaacatcaaactcctcggccaaataaagttgttaattaagactactctatataattctcacctcccttaagtgttagctccaaactttttttttaaatcaaattatactgtggggaatattcttcataattgctaactcttttagatgtattctcctacaaagttactcatctcttccagggtttattacaaaatctaagtacgaaatatcctcatggaaggatgttactatggawcagtagatttaagaagaaaattcagttgaagggaaataaagaacttatgtagaatcaagcaggttgcctgtataaccaaagttttggtgatgtgttggagattaatatataattggactccggttaaatgaagaattgataaattacaaaatactttgagaagaataartaacattacattgatacattacatattaactaacatttattctctcccaacaaaataaaatttttgtttattatgtgtaaactattggggacsctatgttaagtcctttatatatacagtatatatattatgtcatgtgattctcattattgtgaaagttagatatgaacaaaactcgttttataaatgagaatattaaagctgagaggttataattttttcaaagtcacacagctagtaactgttcagggttgcgatttgtgactccagagctattagaatttaatgctttccttaagtgcacatattcattattgtctctattctgtaaactgtaattgtgtcttgcttttgtgttcctaaccaagattattagtgtcttagggcagtgatcyctccgccagcatatcctaaacttgtatgatcatgaaaagcttttattcaggaatgtgtctcataatggggactggtgaattgaatacagctggctaaaatcasgtggaaaagagcctatcacccttttgtttccttacagagaggtcacacctctcatgggtttagagtgtgaaattaacaaataaggtaaacttgggtcccttgtacatcacttaaagcacttgtaagtatattacttttttggggtttggtactacaacccttatcatttcctcttacctttgataatatttcttcatagcccttaatttttaagtttccttaaatttcttggctacctgaacaaggtatttcacctctttgcaagactggggaastgtcatgccttttacatgttctttttctggtttggctaamgtgagacatttttcaggcttgagtgaatccatgaccagtttggtataaatgatgccctcaagttactgctgagctatgtagtttaattttcttattttttacattgaaggcatatgaygtaactttagtgtgttaactttcttcctaggtgtctcttcctcagataggataatcccaccatttttactgtttacagcaaacgttcattatatatgtgacattgtagcattccttgaattcttttctatattctataatttttcctttaaagtccagctatagtctcttcatctttttaatttcaagcttacagaaaattgaaactagtacagtggacacctgtgctaccctttaccaaaattcactaattagtaatgttttgccactttgcattttgctctcttttaagtataggtaaaagaaatcagtcaaatattagcaaaaaactacctatgagttacatacatcatgaatattgtccctaaatacttcagtaatacatctcttgagtttaaggctgttgtgtgtgtgtgtgtgtgtgtgtgtgtgtgtgtgttttgttttgtttttaagacacagtcttgctgtgtcacccaggctggagtgcagtggcgcgatcatggctcactacaacctctgcctcacgggttcaagcgattctcctgcctcagcctctcaggtatctgggactacaggcacctgccgccatgcctggctaaatttttttgtatttttagtagagatggggtttcagcgtgttggccaggctggtcttgaactcctgacctcctgatccgcctgccttggcctcccaaagtgctgggattacaggtgtgagccaccgtacccggccaaggctattcttatataattagaacaccattataacttttaagtaaattaatattagttcagtgatataatcttactatataattcatatttaaattttgcatttgtctccraaatgtcttttatttcactcccgcacccccatgccatgtgagatccatttgaggttcatctgttacatttgttacacctctttcttttaatctataacgtttccacacttaaacaagaaagtatttgttttaatgatggtgactttttttttccctgaggaatccaagcaacttgccttttatagtgtcccatgctctggatttgtctgattgtttcttcctgattatattcaagggaagagtactatagcagttagttggaatacttcttattgtatattatcaggaggcccataatattagcttgttcatataccagtgctgagattaatcacttgattagggtgatggttgtcagatctctccattgtacagggaaattttttttgcttttattaagtatttggggagataagtggcttgggaggaaggaaacagggagatcaattgaatatcctgtttctcagwaattttttacccagcacttgtagtattaatttataatgtttgtctgaacttgatattacattagtgattgtgaaatggagattttcaaattaagtgatttcttctacattaattagttgtcattcttctgtaaaggcaaggtttgccaacctcacttaccttttgttttgagtattccaactcaaagattcttttcattccctaatccattactaggattattcttcttcatgttcagattgtcckaaatttgacctgtgggaaccaactcctatatcatagtgtatctcctttagtctactttctggtacaagatattctaagcttacgttgtatgttctctgccgtggaactgtaatcagcacttttttcaaggagccctggttcctcttcgtaggaaatgatatttagaaagcaaaaacttagctaggtgtacgctttactgctgaggtagtattattgctttgaggcctttttagtagagctaagggatatggttctgtggggatgtgtgtgtgtatatagatgtgtatacgtattttaaaattatgacttcagttagatacgtattattgtagcagagcattacrygttttcttctctctttccctcattccatacttttatctctttggcctgagacattaatacaggtatagcaggatctgtcttggtccacaaagaagtcgtctagggtagttctctcatccatagcaactcagtgagttgaagctgatgtgaatgcctcagtgagttgaggctgaagtggtattattgatcacttcggtgaaagtwagtgataaatttcttacctcctgttatatgtggaattgtttctttccaaaaaggtattctgcattcttaacccccaggtagcccagactgtggcctcatttggaaataggatagttgtagatgtaattagttaagatgaggtgatactcaggcagggcaggcctttaatccaatatgaccgatgccatatcagcaaaagagggcaatttttttactaaattctattttattgcattgttacagacacacagggagattgccttttgatggcagaggtggggaaatggaataatttagctggaagccagggaatgtcaggtattgacagccatcatcagaagctaggaagaggcaaggaaagattctccccttcrgttttaagagggagcatggccctactcataccttgattttagacttctagcctccagaactatgaggttttttttgttttgtttaagccatccagtttgtgatactttgttatggccacccagagaaactgatacaccaccttttacctactggatgattctcaccataaacaaarcatcccacaagggatgcataaacacaagtcaaatatccctcygggkcagctcccccaggtatctgaaggctagcctcatttcagagagatctctactgtgatccgagggctrtatacttccataaacacttgaaggtctcttacaacccattcctggtatagttcatcatacctaatgtggtattggagcaaagacaagatggtattaaacttttgcatgagaagtccagccctggggagtgtatgtagtgcccctgtgaagttttgcttacaattattgaggtcttccaaatgggacsttcatcattaagaaacccaggttggcagtgccttcagtgtagcctcttggctggctggtagactttggttcctccaactcagtttgatgaatacattgtgtccacgattctagacagacccgcagggagtagttagttactccaatctgttttattgactatgccactagcaggccatcccttgttctctcctaagaaagactgagctatggccacaggagtggggctgagagaaacatgagagaaaggrcaattgatattttgcatgaaagctggggtcttccattaacacttccataaattccrtcttaagattaagaagaatgacaaagtttgttcagaccccactggttgaagatggcagatccagcagttgatggtttcagagagctgcaccagtgtgttttttcatgtgaggaagtcttcaaaggtggttctcaaagacaaaagattttactgtctctccctctctacctcctaggatctgtattttcatcttcacatactagaatttttgcttaccctcataaaatcattgtctccatctgagtatctgtaacttcaccttttctccagttatcccgtactaacacccagattatcagatgttcgtctggagagttttagtatgagagatataagggcatttcaatgaaatttatagagactgattacatccttcactttggcctccgtaggccactgcaggagggcttagtgtgaagtacactcagccaagtggtcattatccttattaactaagaccatgtcagtaaaacaasagaactcagtgactgaacccagattaaatttgaatttcctaagccttttttttttccccccaaaggtaggctgccacccaggggatatattggttgagtttcctcaaggtaactgtcaaggaaggaaaggaagcattatgcccgggaatggtcaggacagaatcttaaatttttcaaaatagatctgaataatgcccacatctcttgtattgatcatttcttaggaagcagccaagaagagatgaactctttcttgggatagatgtgtttagtcaccaaactgccgtgtgaaggtgtgtggacaaaaagaggagaggaagtcgagtcacacatattttcatgttaatttttgaggtggctcaaatgcatgtcacaatgctggatgctagcagatgttagggcacatggaatgactgctgaatgccttacctattggcttatgttttggtggcttttgtggcaaaaggcasagtattattagactgtaatatagtccagagagccagaaataatgacatattttaatttaaaaattcacaatggaatggctacagttaactagcacaatgtactctaacacactgtactctcacagtgagagtcgtaatagtagtaaggtgccagtggtagccccgacaaaagaacaaaggctcattaaagtcagtttgctaagaacagatgcgtatgatgccttgactagcatggctgctgccctgcaaggtaaacaggccaatgtttgataagagtctcaagtctagtattcattgtagcttctgcatgaacttacagtaatggagccaggtagcaatggtggtgatctggtaagtgtaggtttaattagcagcttgattccagatggtttgtcagattatgggtcctcactgtgggcgactackttaagtgacctcttggtgactagttcgcatgtgtgatttgttgttcaaaagatagatgtttcaaagagcggtgtctttatctcttagtctgtagtcttccaagtggcagatgatatggttaggccagtggcaacagtcagtacaaatgtgggaagatttgtcaaagtgggtcttggtcaggactatgaggactgccttgagttctgcccactgagcagaacaaccacgcctgtttttggtattacacagctgtttctgaggggaagcagccacagcagcccattaagcacaatcagatttcaacttagcagaatcatcagttactcaggcctgggcatttagggaacctctgtgaattgagggctccactgggccattaactttgagttgggtggcagagttagggataaagtttgctacaagagatagctgctgtttttttaatgtaaaactgatgggtggccagggtcagctgcactcttaaatataccatttccacaaggaaagcctggtggacgcttaataccttagtcatcagatccaagtagaccaaccccagaatagagatattaggcatttgtttgtacttggtggtcttgtgaggcagttgccatccagaaatcaaactggcgttggtacatggaagacaactcatgttgccgtaggcattagtcagcagaattctcagtcatggagactgtagttggaagcagtcattaggtttgtgtgtccccaaagatayggggtgtggtttgctgaacatttgcagtgcagcctgttgcattgtttccttttcagaggacactggtttgtgggctagtctatataaatgatgaagacgaatgytccagtgggagattaacttatttcagtgcctaaagagttcattaaggtgttgggcctcctttttggggtcaagtctgaagagatagcagtttttctttcactgctggggaaattgagtgtttgtagtctgttcacatagtcccaagaaattttatttggtgctggtgagatactgatgccgatccagttttcttactttgaatgtgatttgtttttttgccttgtgggccaaagtatattttaaattttttcactgaagtctgataattctgctatactatgtcttacagttgactattctaggttgcctttttcaggcacacaaagaactcttcaatatgtatatagggactttatttttagaaatgttattatatcgtagtttaaaataccagttctatttcattgttttgtttttctacttcagggactctaattctccatatgtttaatcttttaaaatccaccccattccctcttaaacttttattttgtttttgttctcttacctgcttttaatcctattcttaatgtcctttatttattttcagtcaactccatttttctttgaagactttgtaatacagacttcatttctgcgtggattctgtctgttttgcttttttgaaacatactggtttcctgagtcttactaactgtgatatatcgtcttttgttttttatttctatttctagttgtttaatttctgatttgagattttctgtcttcaactgcttgtttaatgatatttactttaggttggagtattttgtttcagttttctcttcatgattttgtttttagggaaattttttatcagttgaagaatttttattctttctgatttatttttgtagtagccttgtacagatgctgttgatcatttgctgcttcttaaaacttttttttttcccctktcctataccagaccagaaaccatagtttatatgtggggtggggatggctagacttttgagtggcctactgatttcttaattcaagtaccctttctgctcataacgtgaaataggtcgagttcagcaagcttatttttctcccccgctcacttcttcctccctcctatttcttcctctctcctccttcttgcagtggcatattctgattctgaaataatttatgtttccacaggtcccttaattttcatgacctgcttctctgtttcactctatcaccaacccactaatgcatgtctgcttcttctaagttgtttcccactccccacaaagtggtgcattcttaasactgccatgtttgttcctgtgtacttccaagcccctttctttatgttccacagtagccactgttcttgcccaccatgttatagacctgttctcagtgttttcaaattcagctgagattctgtctttcttggggtgattcccacccccgccgccccccgtatttcgcctctgctaggatccctcrtacccctttttccctgtacagtctccaccttcctgttcttgcatggattactgaagttataaatgttaatttcctcacktccatttacatttatattctgtaggattctttttatcccagttactgtactggcattagtagttttgattatgctttttggagaactacatggtttttggagttctttgttggttatcattatcctacaggaactcagtaattgtcgcgtatagttttaatctttgtaggagaaattggaatctgaccacacagaaggaagttctttgaagacaaactttttttttctttttttcttttttttttttttttttttttggagacaagagtctcactctgttgcccatgctggagtgcagtggcatgatctctgctcactgcaacctctccgcctcctgggttcaagtgattcccctgctgcagcctccttagtagctgggattacagacatgtggtaccacgcctggctaatttttgtatttttaatagagacagggtttcaccatgttggccaggctggtctcaacctcccaacctcaagtgatccacctgccttggcctcccaaagtgctgggattacaggcttgagccactgtacctggctgaggacaaatactagcattacactgatgattatgatcatgtgttgatgctagatcacgtgatgttcagggcttcagtgatgatgatcatgtgttgatgctagatcacgtgatgttcagagcttcagtgatgatgatcatgtgtcgatgctagatcacgtgatgttcaaggcttcagtgatgatgatcatgtgtcgatgctagatcacgtgatgttcagggctccagtgatgatcatgtgctgatgctcgatcacgtgatgttcagggcttcagtgatgatgatcatgtgtcgatgctagatcacgtgatgttcagggcttcagtgatgatcatgtgtcgatgctagatcacgtgatgttcagggcttcagtgatgatgatcatgtgttgatgctagatcacgtgatgttcagcgcttcagtgatgatcatgtgtcgatgctagatcacatgatgttcagagcttcagtgatgatgatcatgtgttgatgctagatcacgtgatgttcagggctttggactttctgtgtgcttagtgggattttattgaatgaaatgaatgagaattttttcatattgatgaaaaactcattgaaaagtttcttgatagacagctacaggagtaaagatcatacaaaacggtgctttatttctctaaaaatgctttatttatataggttataactgaaataaatgaaaaaatgacttttaaaactctaatcttgatagctgcttttaagcatttaaagataaaactttctgcatttttatatctaaagctgcaactattatataaagtcataaattacaattcatctttgtattatttttaagcatttattcttggtttcaatgattttagtttatgttagtcatttaacatattaaatgagatttactaattttcatggtctcagaccttagtcctcaaataatttctcttagatgcataagagtcgtttttttttttttttggacccatgaggatgacttagtacartcagtcaatatgagtaaaaccacttcagatatagtcctttcttgtgataggttgttgtctttgtcaccataatacagtgaacaaaataatattctttttatttatcagaagacagtgattatcatgtgcccatgcagaagagagttaacatagcaggcctgagattgttatcgttagaaaggggagctcccaagtgtggcccttgcttgccatatgggaacttggattttgggaatttttccaccattacttagctgagaagggtggttcactgtccctgaactgtttacaaacaatgtggttaatgctgaacacctgctttttttgtgtaagtttggaattttgccacctaccatgcagagggcatctacatgaccaaccttcttgggcactgaatctgtaatgaacctccctggtagaaacactttacacgtgtcacaacggaattgatcctgtgtgacctgacagggagtcactgttggaaacttatctggttcacttcagactgcaccgtgtgccttttccctctgctgattttgctttgtgtcctttctctgtagtaaatctcaaccatgaatgtgaccatgtgctgattcctctgagtcttcttagtgaatcaccaaacgtggtgatggtactggggacgcccaacacacaaccttttaataattctgaaatgttttctcctggtcttggcaagaagttatatatttaatattcattttagtttttatttagtttttcagatctgtagaataagcctcccctgcccctaaagaatcttaaatagaactagggacaaaaagaaacctcattttataaatttgtggctttttgtcgtggaactggatactagtatggtgctattatattgatactggcatatatttttgaaccaatttttattgaatggtcactgtgtataaattctctcctggatccaaggggagatgatggtgaacaaactgacctggctgctgctctcattatctcagagtctagttcgtaaatgtcatgaaggaaaagcacagagatttatgagaggatcctggtttttcctgttaatctgtgtgttcaaaaaggtttatttaagggagtgataaattgcagtgttaagttatacacgaagactaggaattcatgaggcatgtttatctgctcccatgtactagacatacctctttgccatgtatactgagtgtgttatatgtattgtgtgccatgtgtgctctgtagctatagaaaagctaggttgaggccgggcgcggtggctcacacctgtaatcccagcactttgggaggccgaggtgggcggatcattaggtcaagagatcgagaccatcctggccaacatggtgaaacccctgtctctaccagaaatagagaaaattagctgggcgcggtggcactcgcctgtagtcccacctactcgggaggctgaggcaggagaatcacttgaaccagggaggtggaggttgcagtgagccaagattgtgccactgcactccggcctggcgacagagagagagactccgtctcaaaaaaaaaaaaaaaaaagwaaagttgcattgagaagaaggaaggaatttcacagaaatcctatatcaagagtaagcctagtttatcaaaggaaattaaaatttgggtctggtgcagagagtgagaggggaagacactagaagtaaggtctgaaaatgcaaatagtcaatgaattttaagctagatggtgggtaccccaaggtttgcatactcctttgccatttactagagacttcgttatgcctcatgtttttaacctcatgacaactgttgagagagaaattactagtattgtcatgctaaaaaggggaaaataaagtatttgtggctttctcaagtttatacattacaaagttgaaagccagtccacaagtacagattttcaaaattcatgtgttacctatgttctttctacttggccacatcataataataggtgtagtgttacattgtttggaagtcatgataaaagtattatggttattttatatgtatctaaaggccttgccaaaaatgaaaaccagacaaaaagagacgcaaggaaacttttggaagtgatggaaatgtttattaacttgactgtggtggtggtaacatgaatgtgtacatatgtctacactcaccaaattgtacccattatatacattaatcgtgtgggctttttaatataccagttatacctcattgaagctgggggaaaagaatagtccaagaacatttcttcagtgtttagcataagatattcctatggtagtctgccagttcattaacaaaattagagatgtttggaacaatattactgggtagaatagttgcttgtcatggaattttgtagtatcacaagatagatctctctctatacaatatataatgcatatactcagatagttaactggttaatcagtagttcaagaattatttaagaatagtatgtgaatctctatgctttttattcaattttgttgagaatctaaaactcctctaaaaatagtctattaaaaataagtttgatgagaaaagttaaaaaaatgaagataaatatgaataaatatacgaaagggttcctggcatacactaaatctccatgaatgtttcttgtgacggcaatactatcagttgactagaaaagacataatctccatctcttgggacacagtttctgtaatcttgtgtctacctttttgattcattacaataaaggtctttaaagtctgcgtatattctgttctttaccacatgaagctgaagaatagacttactgggaaatcctgcaggatttaagatgtgagttaacgctttcctcattttgacttctcaggttttgcaatatatatatatgaatttacttaacagatattttttgagtatcatgatagttcctgggcatgttatcataaacaaggtttacattgctttgttgttttgtttttattatttaagattataagtgttataatggattgaagtatcttgaggcagtggcctgtatgtcttacctcttccaaacattgaattaattcacccatttattcatttrtttgctaattctttattattagttgcacaaatattaaatacatattataatcatatgtagtaggtaaatgatacggcttgactgtgtccccrcacaaatgtcactttgaattgttcccataatccctatgtgttttgggagggacccatgttgttctgatgatagtgagtgagtyctcacatgacctgatggctttataaggggcttttccgcctttgcttggcactccttcttcctgccgcctkgtgaagaaggtgccttgcttcccttttgccttccgccatgatcatgtttactgaggcctccccagctgtgctgaactgtgagtcagttaaacctctttctttgtaaattacgctgtcttgggtatgtctttattagcagcatgagaatggactaatacagtaagaaaacttgttaaacgaacartgcgttaaatgatttccttactacattgtgtgacattcttcttggcataccacatttaagcattaatatgttactgttagttgtttttttttttttaaggagaaccaaaatttctttgactttcaaaaacygagtgctaactctgcgtattgtatacacttcaacatattttatgttcatatacagttttgctttaaaatatgtatttggatcacatatgttagaattgttttccaaggaaagatctacttaggtctgatgaagaaaatggatgcacagggaacagctttaagaaacacaacctctttatcttacatctagtgaattattcagtcaattacaatatggtagtgaactgttgatttctcagctcttcagaggccttaggtctacttaatatatttcagtgaattcagctgggccctgatatgtatagcgcaaccagaggagcaactgtgttagaagtctttgtgcagggtgttgtttatcagttgtttttttcttctcgaggaccagaaccttaagtaataggtgagtgtgctcgctccagatctttgtgtatcactgtctatagaatttttttatttggggttttattatggcataagtacaattcattttacgtatataactgtaaagacatacaatggtattttcatacgaatctgctataagaagtttgattaacattaaaaagagaagctatacttcttaaaacatctctttaaaaattatattcatcatgggaaataaatatgtagaactgtagatgatataattctttttagttttacataaccttttaaaaagcattataacataaaagattgtagcatttagattaagtgatttttttccccataataaaatatggagaagatttactataacacatttaacagaacagtgccctgcagttattgcctaagccttcctggatccttttgacgcagcgtgactgccctcttcaggctgcataagtatatattagaatttatggcgttcactacattcatgaagttaggcctttactattactatgaactactacaacaaaatatttttcagttaatagtgttggaaatgtagtcattttagttaagtgcttggagtatttgtggattttaacttgccatttcagatggtagtgaggtcagaagtgtgctaataagctttcgtaatgtctcattttgctcatcagtccaagctgacagaaacatattcaaggatcctctgaatttctttatctgtcattagttaggttttctctgtcccctattaaacgttaagaagttgggatatggagggcgcataagggataatgggggtaagtatgcatagggtctttgttattggggcacattttttttttctaatgaatcttttgtactctgaagagatatcattaatattaaaatacgtattcctcgggctcatttatttatttttaatgatatacagatctgtttactgaccctgtttctactgaattacactcagcagaaaaaagcccccatttgccttgtcattattaaattttccccaagtattgtatttgagtcaagaaaatgtgatttgctttagcttctgtggaattctttattctagccagagctatccctaagtatattgtctacaaaattttgctggatgttatggcttgccaggttgcaatggagaatttatgtgaaataggtcacatcttcatttacataatattttaatagtctcatatgttttcccagccagaccattagagtaacattgaaagtgggttccaaaccttcattttcttctcctccaatatatcatgcatattgttgtgagatacagcattctcaaatagtattttgcataatctacttacttcagaaacacttgtttactatttacacaataaaagctgggtcctatttatgtttctaccacttccagagtttattttctaccctgaagcttacattctattacttgaacacagaatacacattccagacagggtagtctttgtttatactgtttctattaccttacttttctctccctgtccttgcttgttgtaagtgcagtccttccagacataccaccattattttccaatttttttttacattcatactttgtcgaactgttccagctcactattatctcatcctctgtatgctgtatagcacctacagtctacattcctctttaaaatatgtataccttatttatgtactagagtgcttatctattctttaacctcttaaaagtggagactgtgaggtatacttctttattattgcagtacatatgaaaatgttgagtataaatttcactgatgattaagatctggattcaacatttgttatgaaattgtcattrctaataggatatcacatgatgatttagtcattgtaacctttgagtcatgaacactattcctttgacaaacagcatatgtttgtgatagtacacagatgtaaaatttcattttttcttcccctcaacaccataactaaagtaaaggaaatctgccttaaaagagacattatccagtgacataaatctgactaaatgagttgtagactctctagaattcagaaattctaatgtggtaaacttagcttaagggtatttatgatayagtgrctggctatgaaactatattattcatcatcagtatcattatacctttattaaatgccacttctgtactagatcctagccattggacaatcaatatgtaataagaacagctatgcataaaatcagtagtgctacacagtcgctgagaatttctgtttcagacatttccatcagcaagcantgtaagtatagtgatttgaagtgacttcctaaagagaggcagtttttgagcaagcttctgaaagaagggaggacattctaagtgaagtatttcatgcacgtggttaagaatggacatagtatgttcgtgaaacacagactayttgagtgtggtatttttataaagacatagattatgtaagttgtggccaagttatggaggtttttgacttttattcttcccattrtcttcattatgtacgtagtggggaacatttttggactttagaatagaggctagaatctacaaattggttattgggacrttaaatctgaaaaagtagagtaatatggaatacagagtttgaaggcaaattgaattcatgctctttgactccccattactttatcactttttattttttaatttttttaaattacattttagtattcaatacttgtattatgttaaaagtttttagattatagtactgttcatatttaaccctcttaaaacataatattttaatcaaaacaatgttatgtgcttcttgtttataaaaaagaactgcagaagaggcccttgcactcatctgatttgcacacaggtaggctaggccagagatgatcctaccagagaatgtttctgctttgtaatttttttcttctgttgtttttaaaaaatagctgtaaatgttattcttgtaacaacattttatacagtaaacttatctttacattcttgttatgataggtatagatttaactcatctcacctttcattgctttttgtttattcttttgtttatcactgtaacactaaataacatctttgtgttttttgttcattacctatggctgatgttttttgattcccgcattgtgatatgaagatgagcagacatcttcttccccatcacctcttcttcttctcttttacataccaaattctgttggctatcgttctatattgtcatagttcataatatgtacattccatactgtaaccataattattacatttgagttctgtttataggttgatttagaaagttaaaagggaataaacagcatttacattattatttctgcataagtagcatcaatggcaaagtagtaggttatcattatgattccttttctacagtgccattgttgataacccctgacccgctcaaaagaatatatttaaataatctttctaatcaccagttcatcaaaattatgatacattttaataagctgcatatttgaaccttgtctcttatgttcatttttttgtttttatttttcctgttggaataaatacggttttcttactatagatttaatatgttctagctgtttctgattttaatgattacttagaatctattcttttcatctcgaagtctaaaattcctgttctagtttgtattggttgcatcatagcttcacagactacagcttctttacgtcttctctccgtgctacctcactcactgcatttctagttgccttttttcctctcttacagtgctctatcatagtcttaagttttcttagtttttcattcacactaccttttctatcagttatattttaaggtaattttctgagaatttggggtctaatttcagattccttacatttccatgaacatgtttatttcaaacttgattatttgtctcaacgtgcaattttaaatagaaaataatattctgaaggaattcttctatttgtcggtatctagtgttgctaatgatcagtccattcccaatctcattgattgcacttgtttaggaaacttttttctctgagaacttttaggatcttctttttatccatagtgttttgatatatcccagtatctctccaggttgttcttttctcattcctcttattcagaactgggaaatgattttaatttgaagacttaatctcctttaattgtattgtttacagaaataccattttctctgtttcacctctcctctatttctgtgatgcctgtttgaaaaaggacttactggactctaggtccttctcattctgtcatacattccacctatgttgtttttgttctgtgaattttattcgactctgtcttctaacattggtgttttatttgggcagtcatattcgaaatctatataagtgctctctcttttactatctttattccttttttatatgatattgtttttgttttttccttccgtgaatacccatgaacaaagcagtctgcatgttctcactgggtatgtcgagaatacaaaggcctgactagacgcgggcagactctgagggttgtatgtgcagtgacaagccttaaagaataagacgytggctgggcgcagtggctcacgcctgtaatcccagcactttgagaggctgaggcgggcggatcacgaggtsaggagatcgagaccatcctggctaagacggtgaaaccctgtttctactaaaaatacaaaaaattatctgggcgaggtggcacacgcctgtagtcccagctactcgggaggctgaggcaggagaatggcgtcaacccaggaggcggagcttgcagtgagccgagatcgcgccgttgcactccagcctgggtgacagagcaagactctgtgtcaaaaaaaaaaaaaaaaaaaaaaaaaaaaaaagacatctcctgttgaacaaagcatcatcttgttatcacgtaccataaaaacaataattcctttaaacccggkgtttctctcctgtaacagtcacctgtatgtgcaggagtccatgaagagccctttgtgttaccgtgtgagacttgggggatagagaactaatgaaaatgaaaaygaactaataaagtcccttttctctgacccaggagtctcatgtcttctgccagcatccatgaaacagtaacaggctaggtcgttagcttgcattatatatgtggtaaaatctcagatcctgcacagttcttgataaatacaatatcttttctgacagaatttttataagtatgttagttacagttacacttccattttcatgttttctgatcgttcttttagagtctgtttgttttgggaagtttttaagaaatcacataaggttttcctcaaatacatgttttttttcgttgcggtggggatgaaggctaacattgggactggttcgggagggtgcagaagtttggtctactattgagtattaagaagtttagccgggcgcggtggctcacgcctgtaatcccagcactttgggaggccgaggcgggcagatcacgaggtcaggagatcgagaccatcctggctaacacggtgaaaccccgtctctactaaaaatagaaaaaattagccgggcttggtggcgggcgcctgtagtcccagctgcttgggaggctgaggcaggagaatggcatgatcctgggaggcggagcttgcagtgagccgagatcgcgccactgcactccagcctgggcgacagagcaagactccgtctcaaaagaaaaaaaaaaaaaaaagtttaattatgacatctgtttttagcttcatgttttttttaaatctccagcctctgctgcttctgaatctaatgtttttctagcttcttattgcactgcaatctcctttgagagtctaacttcctctcaaaacttttcaccagctttctgtttttcagatatttgtggaactctttctgctgctgactctgctccaagtccttttgttattgttaggttgtacctttttatttctttattttcattttggggagaggggggagataaactctagagaacagtcaaccatactgaagaagcaattttattttttaaaaatgttttagcaataacttgttgcttcttatttctattactgcatttacatcctcctataaatgccatttttctgtttcttctctgttcctacataaagttttatcatctggaaaattagcaaaatatctaataaaaatgtgttcaaagtagaaacaaatatcatcttagagaaggaatgtttgtggcatctggtttagctacaaagagaaatctttgcttactgttggtttgaatgtaaatgcattttgagataaatggaatgaataaggtggagtataagtatttaaaattttaaaactattaattttgtttttctgttaaactaagttgcaaatattcttaaaaattggtctttgcattttactaaacattattggaatatttaatttatgtgtatagggaatgctgcaaaatgtttttattccctagagtaagagttggcaaaatttttatttaaagggctaggctttgtgatacatgtagttgctgtcttgttgttacaactttgcccttatagcacataagcaatatgtaaatgaataaatgtggctgtgtcgcaataaaactgtagttatgaacatcagaatttgaattttatgtaattttcatgtcagagaatcctttttttaaaaaaaaatattytaaaaactatgcttttcttacagtctgtacaaaaactggccagtgcttgtcctagggttgtctgttttaataactgctttgtagatgcttcagtactgatgtgtttctactatggcccattattctyatcaggcaagctaatgaagaatatcaaatactggcgaactcctggcgctattcatctgctttttgtaacaagctcttcttcagtatggtggactatgatgaggggacagacgtttttcagcaggtaaagagttatatcrtattcatatatttaacatagttgtttgtggtcgatacatttttgtttgtcacataaaaatacaattcattcatcgtctgaacctgggaggcrgaggttgcagtgagccgagattgtgccactgcattccaggtggaggacagagcaagacttttacacacacacacacacasasacacacacacacaaatacaattcattcaataggttagtaaatacaataagtagttataatacattttgtgatgtgattaacataattatggctaaacttatttttatcattgtacaggtttttgccattatgataaattcattttaacttttgcaacatagaggaaatgtgttttttcagcatgcagtcgcagtttacatgcattggtcttattctggcatttaattataggtggtagtgtattatagatagtattttgcacagatttgtgacattttatataaaatttattgcaagttttacttaactgttattttttccaatgtggcagatagtattttacatatagaggattaaatatttattgacaagtattttctckctgtttatggactgaattgtatttccccaaattcataagttgaagccatagcttctggcgtgactgtatttgaagatagggccttgaaggaagtaattaaggttaaatgaggccataaaggtggaaccctagtccaaagggactgatgtccatataagacgaggaatcgggagcaggagtgcatgtgcagagagaaaaggggcrtgttagaacacagcgagaagatggtcacaggccaggaagaggagcctcacccgaaaccaactctgccggcaccttcctcttggactttgagtcttcagaactgtgaaaaataaatttctgttggttaggtcacctactctggaattttctgttctagcaactcaagcaaactaataagcttatttacccagtattctctatagagcaaggtattagacttgcgattggaacactcattatcatcgatgttgtcatggttgtatcatcatcattgttgacatcgagagcttatgtccaggcactgttcaacttatgtattatttcatctagcttcacagtgagagaaatgttgttactggctccatttcataggtgaggaaataaggaatgcagaaattgttgcttgtccaaggtcacaaagttagtgtaatgtgtaactagaatttgaactcaactgtgtggctcccagagccctagccttaatcatgctgttaccctgcagttcattattattttttaaaatgtttttactatgtgatcaatctatttaaaatgcaaaacttagtgcagttccggggttgatcttttcgggtatcttggtctatctcacatgtgatactctttggtataatgcttaccaggtcatggaaaagcatgcagttctgtaaagaatctagcctactaattstatatcaccattagtgaacatttttacttatttgcatccagattatttcttcttgccagtttctagttaaataaattctctctttttgccttcaacattctttttctgttagtgttcttcacttatttcctccaaatttattttgcctttttaggatatttctttatattcatctattcagcaaatagttttgctcctatggtacctattctataggagcaataaatttggcaagaaaaacatacatagttctcctctataagcagcttacagattagggagctaatgataatagtaataatagtatcataataaaacatataaatatgtaatttcaaataacctaataaaggaaaattagagtactgtaagaaccaaatattatttcatataagtaatagatctctatagaatctcaggataattggccttagagatcatcagatagaagtgctattcaatgtatacttgaatcctctctatcatattggcaaacagtcttctagatccaacaagactgctagagcacagtcttgaggcccaaatatcttacatgactagacttgtggactaaatgaagacagggagttgggttagtttagtttcattgtatctttgttatgctgtttttgttgataatacattatctgttttgttacgatacctgatgtactaagtacatacttagtgtattaaacatcttatttacttttacaaatatgccttctcctatttttattaaaacaatgcctttcttggtatgtctttttaaaaatccttaacagaaacactcatttttcactttttcaaaatacttttatttctttactactgtaagaaacaaaattgccagaacaccatgcatctgatccttggtgtcattgttgaggaagcagtatggtgtgggtggggactacagcagattggagagaggatttgcttgacctcagtgggagaggcgcagctcagcatcagctctgtagaagaaatgtaggccacatgtagctagatctctctcaagaaaagacctaaataaaaatttttatatgaaatttctctctttaaaatgttggcagttaattcatatttttttttaawatcttctgtgatattattatctttgtgttgagtactgaatgtaggctgctggtatataatcatataaataaatggttacatataatcattaaattcttttgtatgctttagacataattattctaaagtttggcgtataagagttgaagtcagttgtttttaattgaaacattttctcaggttaattttgattcagcaggaatcctggtgtagaactgccttgtctttcccaaaatctagtccttggcttagcaacaagagttttcattttaaaatgcagaaatgtgtaaaagttatagcagttaatgagttttatgaggaattttaatctacagaagtggagaagtatatgttttgcttcacttgagaaacactaaaaggtttttaatgcttattttttaactgactattaaatcatattttgctgaagtactgtctctgaattgatgttttaaagcactgttagcagtaatgtggtgtctgaagataatattaataacaagtgcagaaacttggtaatttctagcttgttggggactcactggggaagtaacttcaattatatgtgattcccataggaatggctgaggctaggtatctgatgataggctagtgggttaatgaatatggtgtgttagaaggagctctcatccaggaaacaggtctatgttgtgctctgctgtgggtagccctggggaattgggcattttaattaagaaaaaagactgaattctatgagtttttaagaacctctaaagttttagaacattaggtcttagtatggattttcctatagttttcatgtggggagtgaggaagatggggactttcagctttataattttgtatttacatggttgctatagacgtctctcatatatccatgagagaaacaaacatgaacaaagtatggaatgggagaagcacagggaagaaaggaactggtaactgtgtgctttgttcagtttaaggaacgttgctaaatgtccattacatggaagcccactgctgggagaatggaataagatagactcctgatgtacagggccatatcacacttattagatacattagagatatattttttatatatgttatatatacatgttgtatgttataatctgtatgatgtttacactgcattgcaggmgcttgtgtttacaaatcagtcttctaatgaacttattaaaaaaggtttatgaaaataatattgttaaagccctgcaaacgtggtgaaacccccatctctactaaaaatacaaaaattagccaggtgtgatggcacatgtctgtaatcccagctactggggaggctgaggcaggagaattgcttgaacccaggatattgaggttgcagtgagccgagatcgtgccattgccctccagcctgggtgacacagcaagactccatctcaaaaaaaataataataaataaaatagttttcattaaatggagatagagttcagaaggtattatgatatcctggtaatgaagtgtctagagtcagaaaacctgagttcatcttccatctttacttcttcattgctgtgtgacctttggtaaatcactttatttttatatgcctctactcatctgtaagagagggaaaataatagtacctttctcataaaactgttgggaagattaaaataagatgttagctttagagtaggtagctatgcagacatgagcagggcaggagagggtccctcaccccaggatgtcaggtgaccatcatgtgatgatcaggtggttgttaaactgtcttgctaaaataataattggttgcagctggctgctaggaaaggcagtctcccagtaaatagaaaacacctgaagatggtgattagcagcttcctgctaagatcttaggacttaagtgagtaggctcaagcatgcgcaccaagagacaaaatggcggtgtttaactgtaatatgaccttcctcgcggaacactccactagtaagggaaaaatgcctcaaatgagcatgtgcacaacttcagtaaacacactgtgcatacggcccctcccaagtgctggcaagccactgtgcaggcacatagcccacccaaagggaaaaatcaagggggaagagacaaaccctggggtcatgccagtgtatgaaactccaagtcaaagtccgaacagtgcactttgatgtctcgaagttgcccacctggccttcctccaagtgcacttccttctattcctgctccaaaacttttaaataaacgtcactcctgctctaaaacttgcctcagtctctaactctgctttataaccctcagatgaattctttcctttgaggagccaagaatcaagttgctgcagacctcyagggattcaccactgctaacactaatatatgtagctgtttagctctattcctgatggataaatatatgctaaatagttcttattactattacataacattagcagtaatactggtgtgtagccttccttcttccccaaaccaccttatttttgcataagttggttaaatctaaattctgtagamataattaaaagttgtggtaaaggaatgaagagaaaggaaagaaacgatgaaaagattacctaggaatccctttggaagggctaactgcttaaccattgtcttagttcattttgttctgctacaacagaatacctgagactggctaatttattcaacaggagtttgtggggtgggcagaggcagaatatgatggtttgaatattttgcattcaaacaatgagtaaaaaacattcaaaccatcatattctgcccctaaccctaccaaactcatgtctttctcacactcagaatacattcattttgtcccaatactgccaaaagtctgaactcattctagtaccaactcaaaattccaaagtccaaagtcttaacaaaatcagatatagatgagactcaggacatgattcatcctgaggcaaattcccctccagctgtgtatctgaaatcaaacaaattaactacttctaaaataaaatggtagaacaggcattgaatagacattcccttccaaaagggagaaataggcaagaaaagaaaaaggggtaactggctccaagtaagtccaaaaactsactgggaaaacagtattacatctgaaagctggagattattttttttcattccacgtcccatcatctgggcacactggggcaaaggttgaaccctcaaggccttgggcagccccacccacctctatagctttgccaggcccaagcccacgcaacagctctcccaggcccaagcccacgcaacagctctcccaggctggtgttgcatgctgttggctctgtagtttgggatttcagcagaggccctgctgctgtagatccactaagggggattctttacaatggctctgcctctgcaacaagtctttatcaggactcttgggctctccacaaagtcatttgaaatttaggtgaaggaagacatacctcctcagctcttacattctgggcacgtgcagagctagtgcccagaatgctgccaaggctcatggcttgcaccctccagagtagtgggttgagcaacacttgagcctacttgatccttggtgagggcagctgaggagcactacagcagtatgcagggagtggacaccccaagtggctctgaacagtgagctttgacgtcccatagataccccaggttttcccccaaagagctctgaaatgccttcagggtctttctcccattttcttgatgagtaatacctggcttcctttccatctctgctaatctccttataaatagtccttaggccacattcttcatattctctcctgaacatgttttttattgtttacatagccaggctgagagttttccaaatctttatgttttgcttcccttttaattataaattgtgtctttaaatcattttttgtcttctattttattatatgcatttaaagtaagccatactgcatccagaatgttttgctgcttagatatctcttctgccagatatcctcgttgattgcttttaagttctgcattctataaagtcctaggacacagacacacttcagctaagttctttgcagtttgtaagaaggatggtctttttttccagatttcaatacctgtttctcatttccgtctgagacctcatcagaatggcttttactgtccatatttcttaccagcattctgatcataaccacttaaataagaagttgtagactttccttgcacctcccctcttcttctgagccctctctagaatcaccctcagtgctccgtttatggcaatctaggctttttctagtatgctcttccagattctttcagtctctacccattatctggttccaaaaccatttcacctttccaggtatytgttgtagcagcacccagtgcctctgagaccagtgtttgtcttagtccattttgggctgctgtaacggaatacctgagactggataagtataatgaacagatatttgtttcccatagtgctagaggctgaaagtccaatatttaaatatttacctgccggcgtcttgccaggcacttcttgctgcatcatcacatggcatgaggggacagtgtgagagagaatcaagagcaggctcaacttgcacttttataatagcactcatcccacccatgagagtggagccctcatagcctaatcacctcctaaagcttccacgtcttaatattgctacagtggcaattagattttcaacatgagttttggcggggacaaacattcaaaccatagcaaacatggaccaactcttaatctttagcagtagtgtttgaagagcactaatgtagataacatggaggtaaataatggaaatttgattgcatttgcagtactaaaaatgagaaatttttgatatagagccatttcttttgggtattcagcttgtttgtgctaagttgtgtgaagctctgtaaaatgatttggagctgtcttgtaaataatgactgctgtagtcagagttcatttgtagggcaagacctgttttggtcttgactgtacttggttattaaactttgttgttatgggcagctaagcttttactgttgtatcgtttgcttgatatcaactgtgatctaatgtatatttatatattgatttttgttttcattattagaaaatactgaactgtactgcaagtcaagggctgaaaaatctcttggcctttcattttaaaacttttttttataattcctgggcaacagaaatttaattcgtgtatatatacacatatatatacacacacacacacacacacaaatacaatatatatacacatacaatatatatacacatacaatatatatacacatatatacaaatatatatatttgtagtttattgcttactgcaaattaacctaatatatgtttttagatattgttaaataagcaccgtttatacgagggtagtgttctgtttagtatacttttcaaatggaaattacctrtagaaaatatttctgaaatataatcaatttaacacagttgagttaatagagcagttgagcagaaaaagtgttatttgaggatttcttcttcattctctggtaaatttaacttgttaagagcagaaatgttggtttctctttcatagtcttcatcattacaaaaaagtaaagtctttacatttgtaatagggaattcaatctacttataacttgttggaaattaattccataatatgcttattttttaaaaacaaattccagtactttttaaaaataactgcttaagaagtaaaataattcatgtactgccaaactgctatatttctactttgcactttcagtcacttttttttaccctaattatagaattcaagaaagaaaaagaacgaaatgacttacaaaatatacagaayataatgcataatttgaatgatgtatgttaaatgtgaagattcagataacttagtcagatttacatgttctttttcatccagtagtgaattaagacaaataaaaacagaaatttacctctggaaaaccacttggattttcataataaatgctgttttccccgaatttctacagaaaaagtgtaaaatattggattaatgataagatgatcctatatttagtatttttttctcatgttttacagctcaacatgaactctgctcctacattcatgcattttcctccaaaaggcagacctaagagagctgatacttttgacctccaaagaattggatttgcagctgagcaactagcaaagtggattgctgacagaacggatgttcatgtatgtttttattcctcacagttttaataataggctggttagtttgtttttatggagcaktttaataaggccacagtaatactttttaatttctctatggttgtttctccttgcatagagaaaactgttcgattactgcaaatgataagttggactattagctgaattcagatgctttttaaaatagtggttcactgatattttmaaagccattaaaaatacaggagttaagcacaaggtaatttcagaggctaaaaaacgtttaaaacgtttcagtggtagtaatcaaggaaattctaattaaaaagcaagatatataatttttaatctatcttttggtcaaacagaaaaggttaatacccaccttaaagctacgtggaaaaatgtctactcagatttactgcttttgggactataaattggtgtaaccatactaatagcatgtgtcatgtctgtatgtaatttaacttaacaattccgcttctaggaatttaacctaaggatgcaatcaaggatgatttaaatttttatccatagaaattttgaaaataatattcaytttattgggaaaaattgaatataaatyaaatgtctaaaaataagaaaaagtaaatatactatggcatagccaaaaaatgatttacaagaatattttacctagaatgaagctcaagatgtaaaacatttcaaagtaggttagaaaaatagtattaattaatagtatgatctattagttttttataaagtacaaatatgagtatagattgacatagacaatttattatggaaggaaatgaacctaaatggtgatggtagttcatacttacttggagattttatgaccattttttctctattctcacaactacttttsacagtaaacaattggagccagttattttaaaagtacgttcgtgcaggcagtaatacagaagcattaatttttactataagatataaacacatttgttctgagtcaaggtggtaattgcccacatggtaccactgtcattgtaaaattatatcattggttttaatgacattttggtgactaaacttatttcctaattcttatcattttttaatgttttggcaaatattttgttatgcaatgtatcatttagttggtgcaagacattaagagtaatattgaaagggtactattgtttccttataagaaatactaaattttaatcagaacttattctaacctgtctccctagcagactttacgcatttagtcgataaacttttgttaaaaaaaaaaaaaacaacccataaaactatatgtggaaacaatttctaaaatgttttagaaatgaaaacagtacaaataatgccaatgtataccctttatttaggttcacctattgttaacattttattccatctgctttgtgattatcattctccctgctacccccatgtctctttacctctctccacacatgcagacacatatgcacaattttttctttctgaaaaaaattagggtgaattgcattttgaaagaaataagcaaagcagttatcaacttcataggtttacatttacataatamttttatttgagctaccactacccatattacarttttgtcaagtaacctaataccctttacattgtccaccttcagtacaagatttggtctagagttagatatttcatttaattgtcatgtcttgtaagcttcttttaatccggaatatttctgtagcctgtcttttctctttaaaaacattgacactttgaagaatatagtcctttgctactttttaaatagagtgatcctcatttgatctgcctcatctttgttcatgattgacttctgctcatgcatccttgagtataatattacataggtcctgttttgttttaatcacctctataggcacgtaatgtccatctgtccttcactggtgatacgaatttcaaatatctgatcaagatgtttcccattttttcatggtataattactgatttttggtcctcctttgtaattaataagctgtctatgtggatatagtaagtagtaaaagctatactatastacagtcttcgtgttttaaaggatrccgtcaaaaaagtagcacacagaatgggggaaaatatttgcaaataatttttctataagatacttacagctagtttgtctatatatatatatwcatgagtcttacaacttaaaaagagaaaacccaattcaaaatgggcaaaggatctgaatgggcatttcttcatggaaaatataaaaatagctgataagcacatgaaaagatgctcagcattgttagtcatcagggaagtgcaaagtcgtyttacatagccattatgtcttaaggcatatatcttatggcagaatgaaagtagtgctagtgtcacgtatgaaaagttgggtggcatgtttctgagttctttgcgktgaaaattatgaggactagaatatgatcaaaagaaaaattttatttttctttcatttttgaaatttctattgcatttttgcagattcgggttttcagaccacccaactactctggtaccattgctttggccctgttagtgtcgcttgttggaggtttgctttatttgagaaggaacaacttggagttcatctataacaagactggttgggccatggtgtctctggtatgttaatacattgtgctttttttatttcctgttctttgtgtaataatataagttgtataatattaacaaaatgagccagatataactataatagaacttaagtctgaatgagaagtaactttttagaacttggataatttagtttgagttttctgtcaatcaaaactgtgctatcttccttcaacttttcactgctaaaatgtactgtccctctgtacttggcacaagtgctagataaatacatgttgaatacatctagaaatatggtaagacttgatcagaattaatagctcagaataatttgcaaatggtttggaaattcagctatttctgaatttctcattcagctatttcttttctgacaactgtttcttgtgtatcttctatgtgactgatatatgttagatactggcgatataaagttaagaaatacactctgcctgtgagaaatgcattgtggggatacagagtaatcaacaaatggagtgtaaggttatgtgtgctatgacggcagtaagtaacagagtattacaggaatgcacaggagagaaacctaacctagagtaaagggaatcatgacaagcttcccagattgtgacatgagctgaattytgtagaagaaaatgaaattctaaagtcgttaaggccaagtattcaacataagtgaagcctgggatattcagagaactacagttgtgtggggctacagcagtgatggcaaggtaggaggggaaagagatgacagtagagttcagcagttcccagctcacagccaatagccgaaactcattaggattttatacacaaaacaattcagttataattgaaaataaaatctctttcacaataggaagggaaaatataaggtacttaaaaataaatctaacagaaaatgtatgaaatatttataaatagaatgttgaaattgagactagatacatatacatatatctagataaatacattatatatctgtatatcttatagataagtattgtctgtaatataataaaaatgttattatattaaagatataactacatacaatgtattatatctgtaaaacataacagattgtttacagctamttgtcagttkgtttcttttgctttcttgcagtagcccttcatccttcccattttatttttaccaaaaaattaggggtcttgatgactaagttggaagtgataggacagactgagaagcagcccaggcaagagtcaccttgaagcaatttcattttctgcagtaatacctagagcttagaaattcagacagaacctctgtggctttctagtacatagtcaaaatacaaattagatgtttggccttttaagagcaaggaagataagatttttttaaagaaagtttcttaatattgttttctcacttttgatgaatgagttaaaatggattaattaattgtactgtatttaaagttattggacactatggatgatcttaattaccttagtcattaagttcaaaagtgttttggcttttttccatgctagttttcaagttgcttaattcagtaaagctacccaggtttcctggtaaaaatgcagtactttcactgtgttgttgcaaaatcaaaacttctttggtatttaagagttaatgtcatatcaaatcttgtcactattttagtctaccaaaaattgatgtagtctcatctctgaattacattcaaataacattaacatccttacattattcttattcctcaagaagagcccagaattattgcattgtaagctagtaatagttggcattactctttactgatctcttttttctttggggtatgcttcataactgtgcaaaggaatttatattgtcctcatttataaacaaggaaacaaagattcagtaatctcaacttgtagaagcttacaaagctagaatgtgattgaactgagatttgatctcattgatctgattgcaagttctgtattgtttacacaaagctgggcttctttaaatctggacatgtgtcttatatgttggtgattcaacccagtagatacagtgagcccttatgactacaaataaattcatagaagaactttatatgatgtatagatgttaaatacttcagttgatcagttttcttgaaaacctctgctatgttatacagatttattattattattattattattattattattattattattattttgctcttttactgtgaatcttggaaagcgaattaacttggcatggcagaagataaattctaagataccttggcaggtatgcctgctccccaatcacagccttttagaagtcaataaaaggctgcagagaacagacatgttttcaaacagtgagtttgaaaacactacactgataatataatgttaaattcaacaacgtttgtaatacttttctgcatctcttgcagtttttctcattaatacagagatacttaygtttgatggcctttggcaactccttaaatcatttaaaaaatgagattaaatatataatatataatttacattatatgttttatgtaaataatttgtatatataatttatgttacacatatgtatatataaatatataaattgggtcttctttatcatttctgcctgataccaccaccattaccatcaccaccaaacttgattgttgcttataaattgaaaaactgaatttgttcatatgtaatttttcgtatcctacttttgagatttccttagaaagttaagagactgtccaaaatgctgacctattcattcagattctcaaacatttgtctgtttaaaataactaatatctcatttttccttggaagtaaggaaaaaaatgtatatttttaaatttgccaaaatattgtcatctgacttacacaaactctgatgaaagcctttgactggacagtaaaaggaaagctcttaaaataaaacagtaatgaaccttgtaagagtagacaacttccatagaacaaaaaaatgtatacaaagggaggaaaatgaatgagagaaatgtctggtacagaatctctggccccatgctgactttttagtaaaggacaagtctaggtacaattagcagttgtgtctttttatcactgaacctatacaaaagtacttccaaggagaattatttagtgttgtgaacacttagtcctgggtagactgtattttaaggctcatattttttttgtcttttttttactgtgttattttattgtatatgacttaaaggtagggtaagagaagtgtatgctgagggagtggaagttatatgttttagggtgtaggatggagatagaaaggttgcaatttcctgacataggaaattagtatatgtaaatattaatatgtggaagtaatatatgcaaatatattactttgcaatatatttaaacagtgagattaaatttgcagtatattgcaatatattgcaaagtaatatatgtamatattaaaacatacatatacgttagaatttcctggttcttagttttaaaaaagagctaaagatattcataagtaaatcttcctggtctcatgctttctaagggggaaaaatttttgttaactactatttatagatactgatgattgttcatggaatagaatatgtatcattgattggttctggttctggtttcactcccttctgtcttccctcaccccctaaacacggaggatggtggacaataagcatatacattacttgctttatgatgaatttaaagtagaatgatggagtaaaatattgaaatacactagtacataatttcaaaaagtgtagcatagatacgtagtttatggtcttgagaaaacaatattgacttggaaccaaaatgagttaaaattgtatgttttgtagcacataatgaagatcttcatggcaacctaaaggtcctcataggtgactgtcatttcaagccagaaaatattagtaggataagcaataacattcatttcaaatacaggaaaatatcctaaggatatgcacttaaaagcatgaaagataaagcatcattaaaataatgtaataacccaaccttattatcacagtaaatcaccgtaggatagaagctgttttctgccttttaatactgtgtattgtaggatgattcatacaccttcatgtttcttttgccccaaataaattatgtcattttaattaaattttttgaaaatcttcaacattggagattagtatatgtcattatacagtatttacattcatgaaaggtactttggcatgtacacattgtgatttatcagtagaaatttatttcttgtgaccattcaaagttacagatggctttgagttcaaatgggggtagaaaagggtcttttttcatccacatttatttgaataaaattatataacttttagtatatacatataatctttatttttttctctttaaaaatgagaagcaagtaatttctgataatatttttttcaatgaaataatgttgtttttggatggccccagacagttctgctcatcaggcaactatgtcatttggccatttggagttagttatggtttttgcaaacaggtatttctatgtatagccatttgtgtaaagagttaggaaaacagaaaataaaatgaattcgtatatttttaggatatacttaatatatctaattcttaattttctgtagtaggagtaagcagtggcctcaaaaactcaaagtacattttaaaactactcatatatggatagattttagcatttgaatgttcttggctgagtttttgcttatcttattataaagtcacaattgaataagactcactgtgaagttccatacatggatctactacacttcatgcacggctcatctccttaatccaactcaatagtggttataaatacttgttgaaattgttatcctcaatgcataatttcctttccatggaattaaagacttagtcttaagctttttgttgttgctgttgctgaaatgactgtaaagatacgtcttacctttccttttttttgtaactaaagcagtatatagattgagtataaatgaaagaaataatgatagtatttctgtataacactgaaaccaagttttaaaaaatgaacaataaataattcacttgtgaatagtagaaatgcagtgtataaattcactgatatgcatgtctgctgttactctgctgatttataccacctgtttattaagtaatgtcattaaattacttayaacttgaaaacatttttatattttaaaaacatggaatatacaaaggattgtataaaatgtgtatagaatattacatattttctgcatagttagcattaaaattttcactttcactagcagcttattttcatattcagctgattaagataccttcaaattaactcgtggtcttawttaaattttgttttcaaagctgtatcaactgcatagtggaaatctatgaaataattatgaacccaaagtgttgamagcatgtaatrgttatttttctttttttaaatacaatgtgaaatgttttccccaaaccaaatcgcttatgaaagttcgttgtatagaatagttaaaagcaaagttgctgtagttacagtgggcgtgaacatcttgaccctttggaaaactataggatctgagcagtttgttttgaaaaacaaggaaaatagacggttaaagsaggatgccttgagccaatggtgttctcagctcaccacagggctatggcaacctctagatgtgagaaagataacatgtggttatgttcagttgtgtttattgaatgcttgcctgctatataaatgctgaaagtaagtgttctcccactgcagtgaggtggaaggattggtatctgttttgtacatgtagccacagcatttagaattgtgcctggcatgtagaaagtgtttagtaaatatttgttgagtgagtgaaagttacatgaataaataggtttaaggacattttaagacatggttgttttttttcactgttacttatagcattgtaggtcatggctgggactagtacattttttttctagaaatcttaacttacatattcacatattgatcagtcttagaatagtgattctttgtttcagtgcatttaccttttctatgtttgttcatgtttattcatttgttgaccattcaacaagagtttgaaagctacgtgtatcaaaatctatgaagaaccatgtggagatacaaagataagacaagtgaaaaagactagcacgtgagccctgcccacagggaccttacatgtgtagtgaggaaggtaaatcagatatgtatatcagtaacatacaaatgctttgatgaacatatgtccaaaatcttggtgtcccaagatggtattatttgtgactctcaaagaaaacacaaatgtccaaaacaaaatacttccaaaaggactagctttgagggtgttctttgaattaactgcaacaaatatctgagtagctgttttattcttactcttttcaggattattgtctagtgtcacttttgtcctgaagccagagttcaaaaagaaccatttatgatgctgtatgaaactttagatacctgagtgtctggttctctggagaaacaaaaaaataagcagagtttttggttagaaacttcacaagtctcgagtctcgggatgtatgctggtggtaaatggataagtttcccaagtggaaagcttctaaaaagcagagtagagtattttgcaatcttgtgaattagaagttacaatttgggacccactggactcttattggaaaaccttcagtggttgagatcaaatgtagacagagctttgccagggccatatccagccatggctcagtacattccccaattagattagggtgataacacatcactattaaggttgacaatatcaaggaagttgaacaactttaaaccagcaaacaaaaccaacacaagaagaatgagaaagtcttcatactccagtatggattgaatccattgctgaaacaattgaatccaacattgctaaaactttcattccatgatgactaactcttytaaacaattgagacggaataatactcaycttaggtaaacttttctgtgaataaaaaaagaggaagtgcctctattgtctgaagcaagactaactttgattctaaaatctgacggggacatttaaaaatagaaaactgataggccagtctttctcatggatatagatgcatttattctaaacaaaaaaattacagacagtaataaataaaaatggtaatacattgtcaagttatttcactaatacaagaatggtttaccatgtgaaaattatcagtgtaattctctgtgctaataaacaaaaaaatatgatcatctttgatacatgcatatcagcacttaataggttcagtgtttatgtgggaataagagaaaaaacaaaatagaagggaatttccttaatctgattaaaaaacatacagtaaacatcatatttggcaacttcctaaaattcctgagataaggaataatacaagatgcctgctcttgagtattttactgggaccctgagcattgcattaagaccaaaacaaaaaacccacacacatcccggtaaaaataaaattgccctccttagcagatgatttgattttgtacatagaaaaaaaaattagacctaattcgtaaattgggtaaggttaatgaatacatagtaaatratgatgattcatgtcataatgcatcataaaaaaaggaagttttaaaaaaatctattgtcatagcatcacaraaagttttgaatcaatctaataaaagatatgcacactgaaaactgaaaaatctattcaaataaattttttaaaaacttaaatggcaggtaaacctgataatggattggtagactcaacgttgtaaagatactcgtcttgatcttgagtagaatttgtgcagatttttttctgtggaaattgacaatgagattttagcagagggtaatgaatagaatagttgagacaatatgaaggaagaataatgctggagaacttacacttacagatatcaacatttattatagatctttaatatttattcatttcacataaagccatctggaacagaatctatagtccagaaacatactcacacttataaaatcacttgatttgtaacgaaagtggccttgcagtgcagtgagtaagtatggcatttttgataaatattgccgrgccaactggatatccatatgggaaaaagatgaatttcaacttttacctcccaccatacacaagaggaatcgtgaatctaaaagtaaaatgcgaacattagcacttttagaagaaagcatggatatgtatctccataattggtgggtgggcaaagatttcttaaaacagaacataagaagtggtaaccataatagaagaaataattgataaactgaactacattaaaattaagaacttctgtttgtcaaaaacaccattaataaaatgaaaagaaagacaagcctcatgtttggtgaggactatttgccatgtgtatatttaacaaagaactggtacccagaaatataaagaatcttgacaaaacaagaataagacagtgaaattttaaaagaggtaaatgacttgctgggtacttcacaaaaatgtccaaatttcaattaatatatgaaaaggtattcaaccttattaatcagggaaatgcaaataaaatgacagtgtgacactatcatacctctgccagaagatccagaatgaacacacagaggctcacagctaataccaataattggtaaagatggatatcaagtggatctctcgtgtactgttatttggaatataaattttgttcaacctcctgagaaatgtgtttggttttatctgctaaagctgagtatttacatactctgtgatacagaattttcaagaaaatgtttcttaccttgggcaggttatgtagattatgattaggaagagacacaagagagctcctgtctttctgttagtgtgttttgtgaaaattaatctagctgtaactatgaatcatgcccttttttgtatgaatatagttaaataaaaatattttagtcaaattgattgcaaaattaaaacttccagattgctgaaagtaatgaaatggtgacatatcagttgttaacaaccaaaaaaggatgcatcagttatgagaattttgataaactgaaacctaggctattttgcattttagaagtgcatgttactcagtgttttgttgtttcttatgaaaagtgccagcgctatgtgagtaaatacatttgccactacttcagatgattctgtgtattattccaggtttgaacctggttttgttttattaaaccatttcctggaatcttgattaattatgtattaagatgattttttaaastggtgacataccgtaaatagtaytgttgctgctattgcctcttttcctccatgtagaatgtaagcttcctaatgacagttttctgtctcatgtttttgttcatcgctttatcctcagcttctaaattagttcttaaatatatagtaagctcttggtgaataaaccttgtatgaataaatgatacttttttttatgtcaggggacatgtcacttattcaggatttctagctgaggatggcaagcctctttatcttattcattcttacatctctagagtccagtaacatacctgttatacaatagtgcctccagtaagtaattgtcaaatgagtaaaataaactggaaaggttccatggagaaccatttatgggccatgagttaaccctgttttagagattgactgggttgacatagcatgaacaagatgtggatgcaggcattaccatcatggatgcagggggaagcaagaagagtggcctgaatggagcatgcagtgccagttaaggagcggtaggacatggagctatttaaggagtatgggagcaaattgtggggggatttggaataataatatttattgagcttgtgtattgtgtgcaatttttaaatgctctacatggattaacctacttaaaacccctgcggtttagaaagattgataccaatattatcctcatgctatagacaggaaactgaggcccaaagcaatggacttgctcaakgtttaaatgctctacatggattaacctacttaaaacccttgcagtttagaaagattgctaccaatattatcctcatgctatagataggaaactgaggcccaaagcaatggacttgctcaaggttgcacaggtgctgaagatacatctgcaactcgagtattataatttataagcctccattcccaastattatgataaaattctaggcaaggtactttaaacataccagtggtaggtcttaagagcacagaaggttcttgggtagatactcctgtttgtgaatatcttagttggttacatatttttatagccaaaaaaagtgagacttcttagattctctctaatttctgggtttagatatcgttttttatttgccccatcttcttcccttttgtatccttgttttctcctttaaaaaaytgtgcaaactagaatatttagactcccagtcrtgcattgctcgttcttgtctttggtgtttttggtgtttttattgttatttttggtacaaatgcctatcagagccaggaagctraagtaaggagtgattgggcaagttataggatagcaggaagtacaggtactgttttaacctagagaacacatttagtctaaaggagtcccagttcattaactttaaaatattttgtgatttaaacaaaacatgctgacacctcagttatactgattgaactgtgacttctggtttatgcattctctccccaccctctctgcaataccttggatcttcaatattagttttccaactacagctttgtctgatatattcagcaggtatataatctttgcgagttattcctggctatgtctttttgtgatttcttccatctctaaacatcttctgaatttactgtgtystaaactttgctgaaagtatttaggtacttacggagatttaagtaccgtaatccaagaatgtagggttttggttatccaaactaatagaagaatgatgtttagaggatatagaagatgattatcatgtcctttaaaatatcactagaacatcaagtgtctcatctgtgcttctgactggctcaggtgagcacatagtatcagattgcctgtcaccaggccagatgctttacatatgttatccgatgtaattattaacatatttctttaacagagctggcataccaattttatagatacggaatctgagatgcagggagaataagtaacttactcaaagtcccatagttaataagtgaaattttttaaaatgtgtgagctgatacatgatttttaaaagatactttcatgatgaccattgtcttttagaaatgcattattctggtattctctggtttacatattgaaacactgcaccctgtttttcagtgtatagtctttgctatgacttctggccagatgtggaaccatatccgtggacctccatatgctcataagaacccacacaatggacaagtggtaagtgtaatttataagcatgaatattctgaagtktaatccagcttaatttagraataagaaattatgtttagtatttagtaggaaaagattctgtttgtcagtcaaaatatatattctttctcatttactacctgtgtcacctatatacacatgtgcatacacacacacacacaatattacttttgttaggatgagggctgctttagtgttgatttaaaaaattaatatctaccatatcaaatatacatgcattcactattttttcaagtttatctgctgctatggcgataacatgtaaccccactagaggaaatcggaatagtttatagccaatgtccctcccatccrtggtaaatttaattttcttcagaagggattaagacattattaagaacccgggtggtcattgtattagaatgttaggaactctttgccacagaattaaaagtgaaattgatatgttgttacattagtagcagagttyacgttagtaactgccaccgaattcacataactgagtttgttgccttctctttacgtttggtgaataggaaatactgtgataaatcaacatagaaacatactgtctttgagacagtattaggatagtgaagatgaacagtttttcgttttttctctaaccttttctgctttttcttttggaaaagatacgtattttgagaataatataatggcatggcttcttgtacccatcactagactttttcagctctcatctcataactattcttgtttcatctttctttctgtccacctgctaataataaaataattattattactatataataatcaatttgggcccatatttttgggaacattttcagatttctgtagtggaagacaaggatatggagttaaagctagcctctttgaataattggttgccataataagttagacatagtttttgctatatttatatgtttttaaaatctggcattatttagaagagtaatttcagaaagtcttcaatattcaaaattcagttatacaaagaaaaataattggaagcaattttagagcaataaattattcccttacctttaatttttcacacaaatgctggcttcccaacaagayccttcctgacgacactatttaaagttagccctttcctctcttcctcctccctggtccctatactctgtctccctctcctgttttattttttctccacagtacttgtcaccttacartatgctacataatttaycgaatgtgttattttgtccgtttgccttttgccatgaccctagtaatagataagcttctgaaagaatggattttatcaggttttgtcactgatacatttctgttacataaagaagggcctgatgcaaagatctgatcgctgtcgtgttaatgacacttaacgttgtaaatttaggaaatcttataaatttttgttactgccttttagtattcttctaagagtattctttaggtataaaacwtattaaggcattgcttttcattattgtttatggtttgttaaagtatacgaaaarttattcaacattcttatgaaatgttttaacatattgtattctttttttttgggagggtttcagacttttttttttcttkggtkgttagaacttttattttaggttaggggatacctgtgcaggttagttacattggtacattgcataatactaaggattggggtatgaatgatcttgtcaccgaagtactgagtatagtaccaaataggtagtttttcagccccttcctcctctaccctctaataggctgcagtgtctgytcccatctttgtgtccatgtttatccaatgtttagctcctacttataagaacgtgcagtacttgattttctttttctgttaatttgcttaggataatggcctccagctgcatccatattgctgcaaaggacatgagttcattcttttttatggctgtatagtattccctgttgtatatgtaccacattttctttatccacactgtggatggacacctcagttgcttccatatctttggtattgagaataatgctgcaatgaacatacaagtgtatgtgtcttttttgtagaacaatttattttcctttgggtatataccagcaatggatcgctgggtcgaacggtagttctatcttaagttctttgagacatctccatgttgttttccattataattgtactaatttacattcccaccagcagtgtatgtgttccgttttctacacagccttgccagcatctattatgttttgacttttaaaaaacagccattctgactggtgtgaaatgatatctcattgtgattttaatttgcatttctctgatgattagaaattaaatgtatgtaattaaattattagaaattaaatgtatgatgtgtggagcatctttgcatatatttgttgcccgcttatctgtcttcttttcagaagtgtctgttcatgtctttgcctgctttttaatggggttatttattttctgattgttgatttaagttgcttatagattctggatattagacctttgtcaggtacatagtttgtaaatgttttctcctattctgtagggtgtctttttagtctgttgatagtttcttttgctgtgcsaaagccttttagtttaattaggtcccacttgactattttttattttgtttagattgcttttgaggtcttatccataaatgctttgccaaggccagtgtccagaatggtatttcctgggttgttccaggggacattttccagcggacatttggtagtgtctggatacattttagattgtctcaamtttcagggcaactaccgactactggcagttagtggtrgaggccaggaatgctgctaaacacctaaaatacaaaggacagcctcctatacccaattaaraaaatcatccagctccaaatmtcagagtattgaaagtgagaagcctagagaaacttagatgtaattttgacttcctgcatattttgcagctaagaaaactaatccatctagcatataaccccaaagaaggattttctttttctgcaaaaaggagaaaatttgaaaaactgaaatagctagagcttaggatcatgstgacctacatttaatgtttaggatggttgtatatattgaaagtcatcagtaaatatgattggtttgtaaatgtttatttttttaattttttaaaattttattttatagagttagggtctcactctgtcaccttggtgcagtggtacgatcatagctcaccgcagccttgaactcctggctcaagtgatcctcctgcctcagtgccctaagtacctcggacactgtgcctggcctttgtttttccccaagaaatagggtctcactgtgttgtccagggtggtcttgaactcctggactcaagcagytctcctgcattggcctccctgagttctcggattacaggcctgagccactgtgcccatctgtaaatgggttttcttttactatgcgttagtaaatatgatttaatctgtgacattttatatgcttacaaagagattttgataagagaaagtaaagactctggctcacagagacatttttatgcctttgtcctgaagtgtgcaggcaaagagaaacagaaagaaaacagagcagggttcttttccaaactckgactcttaccaggtctgtcttttttggggaagttacttattctctctgttcttcttctgtaaaatgagttgaattctgcttttcttagtttgtagtttttggtagataaaatctgataataaatacagggctgagaatggctctgtccatgcccatatcagcacaaaactggtagatagcagtgccataaggcaaagagggaaggtggtgtcagacagagccaggtyctatgacacatagctaccagggccaagccagcagtaggcttagtgcaggggcaggaaaggtggggagtagtaagataggcagatgctggaggcactaagaagggtgccatgggtgggaggaacagaaagagaaagacagagacatccactggttggagaggcctcgtctgcataagcacttttaaaagttgaaaacacacgtgtcttattttgaagtcctttcagaacagatccaaagacagtgatttaagtgaaagaagttcatattggaggttaaggaaacatgggagaagagagggaaactgagtctaggaaggaaagcagtcaaaaaacatgtttatccagtcagtattgtgagccactgaaccttatttctgctatgagatctctgggagcctgtgtagggcatgtatgtcaactttcctactacagtggtaagggagctgaggtatatatacgccagatctcatcagccatttgctgagtgctrttctcttggcaaagttattacttctccagcactggtggactttgtctgtcaaagaaagccatctagtcaaagaaatgcaggtgctggtggtggaagtcaggctggaacacactaaggcattaagggcaaagaaatatgggtagtatactactcatagactgtatttactacaatttatatcagtttatttttttttagtagattccaaaggagaggaaaaaaataatgaaaaaaccacattgggtattggttttatttcgagatatgccctggaaaaaaagcaacaaataaaagtctcatcaattaaatatagttttatttttaagccaatatcatatgtcttgtaaacaatccttcagaakaaagtagaaaaatgtaygcatatttaagaacatctatctctataggaaattttgtctttatttcacattttaacaagtctttttaaaaattttaaattgatggagtacatgtgcaggttgttacaagagtatattgtgtgatgctgaggactgggcattactgaggccatcacacagataggaattttttcagyttttggcctccttccctcactccctctttttggagtccstagcatctgttgttctaatgtatatgttcgtatgcacccaaggtttagctcccacttgtgagaacataaaatatttggttttctgtttctgtgtgaatttgcacctctagctgcattcatgttgatttggaggacatgattttattgtgctgcatagtattccttggtgtatatgtaccgtattttctttatttaattcaccgtggatgagcacctaggttgatttaatgtctttgctattgtgaataacgctacagtgaacatacaagtacatgtgtctttttggtagaactgtttattttcttttatgtatatacccagtaacgagattgctaggtagaatggcagttctaattttagttccttgaaaaatctccaaagtactttccacagtggctgaactaatttacattcccagcagtggtgtataagcattcccttttctccacagccttggaagcatcttttttttttgacttttctgtaatagccrttctgacttgtgggaaatggtgtctcattgtagttttgattggcgtttctctgatgattagtgttgatgagcattttttcatgtttattgaccacttgcatgttttcttttgacacgtatcagttcatatcctttgcccactttttaatggggttattttttgcttaagttttttaagttccttatagattctggatattagtcstttatcagatacatagtttgtattttctcctgttgtgtaggttgtcaatttactcaattgatagttccttttgctgtgtagaagctcttcagtataattaggttccacttgtcaatttttgttttatttgcagttgcttttgaagacttagtcataaaatgtttgcctatgccagtgtccaaaaggatatttcttaggttttcatctagggtttttatagttttaggtatttttaagtctttaatccatcttgagttaattttgtatatatggaaagctagggatcgagtttcattcttttgcatatggctagccagttactccagcaccatttattgaataggtgtttattccccattgtttgtgtagactttgtcaaagatcaggtggttgtagatgtgtaactttacttctgggtcgtctattgtgttccattggtctgcatgtctatttttgtaccaataccatgctgttttggttactgttgctttgtagtatagtttgatgttgggtaatatccctccagctttgttatttttgcttaggattaccttggctatttgttctctgtttgggttccayatgaattttagaatagcttttttttttctagttctgtgaaaaatcatgataaattgagaggaatagtactgaacccgtagattgctttgggcagaatggcgattttaatgatagtgagccttccaatccatgagcatgggttggttttccatttatttgtgtcatctatgatttatttcagcagtgttttgtagttgtccttatagagatctttcacctctttggttacatgtrtgcctagstaatttgtgtgtgtatgtgtgtgtgtatgtttgtggcagttgtgaataagaatgtgttcttgatttggttcttgmcttgaacgttattggtgttttagaaatgctactaattttcatagattgattcctgaaactttactgaaatcgtttataaagccttttrgtagagtatttagggttytctagatacagaatcatatagtctgcaaagagagatactttgacttattcttttcctatttggatgtcttctgtttctttttcttgccttgttgctctcatgaagacttccagtactatgctgaatagtagtagagagtggacatccttgtcttgttccagttctcagggagaatggttccagcttttgcctcctgttgagtatgatgttgcctgtgggtttgtcatagatgactcttactattttgaagtatattcctttgatgtgtttgaggatttttatcatgaacagatgctggacattattgaaagctttttctgtgcctattgtgatgatatggttttgtttttaattatgtttatgtggtgtattacatttattgatttgtgtatgttgaaccaacttggcatcccagaaatgaaacctccttgattatagtgaattaaacctttgaatgtgctgttggattcaatttgctataataatattttgttgaggatttttacatctatgttccttagtgatattggtgtgtaaatttttgttgttgtgtctttgccaggttttgatatcggtgctgctggctacatagaacgtgttagggaggattccttcatccttgatttttttttttttttggaatagtttcagtaaaattgatgtcagctcttctttattatccatcttgaattcatctgaggattccgtcctccttttttttttggaatagtttcagtaggattggtaccagttcttctttatatattttatggaattcatctgaatacatctggtccagggctttttttggttagtaggttttttattactgattcaatttcagaagtcagtatttgtctgttcagggtttcagtttcttcctgattcagtcttggaagagtgtatgtttccaggaattcatccatttactctagattttctagtttttgtgcaacaaggtattaatatagtgccgagtatcttttttatttctgtggcatcagttgtaatgtcacctttgtcatttccgattgtgcttatttggatcttttctcttttttttttttctttattagccagtagtctttcgatcttgtttatcctttcaaagaaccaacttttggtttcattgattctttatatggatttctgggcttcaatttcattcaattatgctctgattttagttatttatttttgtctgctaccttttgggctagttttttcttgtttttctgatttctctagctttgatgttagactgttgagatttttgtcttcttgatctaggtatttaacactataaacatttctcttaatattgcttttactgtatcccaaagattttggtatgttgtatctttgctgtcrtttgattcaaagaattttttgttttctgtcttaatttgctatttacccaaaaatcattcaggagcaagttgtttagttactatgtaattttgtgtttttgagatttcctcttgatattaatttctatttttattccactgtgatctgagaatatgcttggtatgattttgattgttttgaatttattaagatttactttgtgaccaaggatgtgattgatcttcgagtatgtttcatgttcagatgagaagaatgtttattctgcagttgttgtgtggagtattctgtagatgtcagttaggtccattgcattgaatttaagttcagaatttctttgttaattttctgcctcagttatctgtctaatgctgtgagtggggtctcgacattccccactattattgtgtgcctgtccaagtctttttgtaagtctagaatttttttatgaatgttttatgaatctgggtgctctaattttggattcatatatatttaagatacttaagtcttctggatgaatcgaactctttatcattatgtaattaccttctttgtccttttttaactgttgtcgttttaaagtcacttttatctcgtgtaagtacaacctctgctctgtttggtttttcattkgagtgttagatcgttttccattactttgagcctgtgagtattgttacatgtgaaatggatctattggagacggaacatattttaatgcagttttccmctgtgtgtctattaagtggagcatttagactgtttacattcaacgttaatattgatatgtgaagttttcttcctatcgtggtggtgttagctgggttaacttttattcttgattgtgtacttgctttatagagtctctgggccatgtgcttatgtgtgtttctgtggtggcagctgttgttcttttgtttccatgtctagaactttctttttttttttttgtagctgttgtaaggccagtcttgtggtawtgaattctcttagtgattgattctctgggaaaggcgttattttttcacttaccagcttagtttggcatgagatgcaattcttggttggaattttgtttcttgaagaattctaaaagcaggccccattctcttctggcttgtatgttttctgataggaagtactatgttagcctgatgaggttcccttcagaggtgatatgacccttttctctagctgcctttaagattttttcttttgcgttgaccttggaaaggctgatgactatttgccttggggatggtcaacttgggtagtttcttgcagggaatctctgcatttcttgtatttgcactttcatttctctagcgagattgggaaaatatttgtgggttatatcctcaaatatgttttccatgttttctgctttctcttaagaaygcacaatgaatcatagatttggttgttttacacaatctcttatttctcagaggctttgttcatttcttaaaattattttttctttatttttatctgactgggttgatttgaaggagtgatgttcaggctctgaaattgtttcttctgcttgatctagtctattgttaagacttccaactgtaatttgaaattcctatggtggatttctcaattccagaagtttagtttgtttctttcttactatatctttgttgtatttcaaattttggattgcttttctgacttccttggattggagttcagcttcctcttgtatctcattgagcttctttgccgtccaggttctgaatttatatctttaatttcagacatttcatcctggttaggatcgattrttagggagctagtgcaatcctttggatattacaaaacactgactttttcaattcttgtacttcctgcactgattccttctcagaaggaactggtgcttctttttctttttgaatttgctgttgttttgttggggctttttatttttatgttctkttttccttgaaggtttgactatggtatatggtgtgtatagtcagctggcttcgtttctgagtactttcatatggccaagactttgtatggtttctttggttgtaaataggttcctgtggtgggtttcacaggctctgagtgctgaagcaatgtggttttgtttggtggtgtaattcagagtgcagtccaccagctgacacttaagagataagggcctgaaaataggatcttagtcgtgctctccactttagtatttcactgcattcaccgtagtgctctggggagggarggcgggggccatatatgactgcctctctggtttctgagatttggtggtaacccattcaactacyggtgcctttccaatgtttaccttgccccaggggtgggtggggggcaggctctaatgggctgtgcttctgcctcccatagagcagtccaagagagtcacaactccttgggaacccactgttcctctgtatttgccagagtcagagtgagttgtggagtgtgttcactggtggtctggtgatgcagtagaggaagggcagaggatcctgaccagggcagtggcaccgtgtgtacaactggtatattttcagcctggcagcccaagaggcttgagttctcctgacctggtgggtctcccgccagtgtctgcaccaggagcaggcccaaccggctaagcttgtcgtaagccttctgcacctagatcactgttctaggcatttgatgccttgggactccctggggaagaagctgcagctggctgtcaggctgcgttcctcccggactggtcttatgaaaggagggatgcccagctctgatgtcagcacatgagcccatgccacagtcttctctgtgttctgagattgagggctgcttccccactcaagctaaggccacagatctgcagcttggtatccctgggtggtgtggtcaagtcctggggagttgggaccagatccaggggtttgttctctagcccctggatgtaaagcagcagctstgctgcaggagagcagactgctcctagacctccagcaaaacactcagatggggcaatggaggctgtgctgtgggcacacttctgcaagatcgttcaggcaggcaggcttaggaggggccacggggttacatggatcagatgcaccccagtcctgtggcaatggtggccctgctstcttgcagcctagcagacagcagtagctacagccactcagtacagcatggcacacctcggggcgtgaacacctttggtcacattttgctggagctgcactgcgtagtgaaacatttgggggtgcatgcaagtttgagctgtgcttctgcctattctctgagtggcttccctgccggttcagaggtctttgggggtcttgggaaacctgtagctgggatcccagaggtatgtggtgggagtgtgctgccgaaattccttcactcaccgcttcctcaggtstggttcagtacaggaggccggtcctagtgcccagcgactctgagtggcttcctggcttcctccctctttaatcacagtgtccatctcttctctattgacttgatgctttctcacaaaatctttattcagagtgtgatggtttatttgatattttggttcctcttggtggacagttcccggctgtttctagacatcttgaagattttaaaaattcttaaacagttggatagataatttgttcccttaacagaaagtttattattgatgctctgtcaacagggcctgtgttttgaattgtatttttcaaaagtggtattcactgcagtcctctgggctatttatttctactacacattgaccttaacatcaacagtgtacacttgggggaaacactgtttagaatggcgcatagtttgtggcagtcaacagaatcaatatataacagacctatatgagctctgaaattctgattctatctttaatagcttaattttccaactgcattgagcaaattgggcctgacaagcttagtaaaagacaggagtattttgttgggtattcatttagttcttaggtttttttttttttgaaaaattagtggtatttgtaaggctagtgactctgctcacattttcatatattaattgtgaaatcaaacatgtctaggaaaacctgaagatattgacaaagtgtttcttcattgagcttaaatgtaaatgaatacagagaatataaagaaaattaatagtgcaggcagtgtgatgcggtgctgctttgcaagtttatttgtttgtcactattaagatactatgtaatggcacaagtcaagtactaatggtccacttaacagcatgaaaatcaacacaaaagsagtcattattgtgtagctaaagggaaactatacaaacatatggttacataggacataaaaacaatttttgttgttaaaaaagcaataatctttaacaatatgcatttaatgaaataaagcttatgcgtaggctgtaactcccaccgtgaacaaatgcgttattttcaagatttggattttagctactgcttgaggattgctatgggtttgccagatatagtccaaaaattttcactgcattacaattcagttgtgagtaaaactaagcgttatattgtgcatgcacatgcagaacattttattgcaaaatgacctgctgatttagtctaaaatttatcatcgaggcattttttttttctatttcttaggcagccataccatattgtactttatccaactttcttcactttcatgcctcagggattttgcacatgctaggtctttgagagtcattaaggatgctatcatcccattttttaaaaaacttaaaaatcatatagactgatttagattaaatataattattatattttcaacagaaatatttacaaagggcattcagtagctttattacagtcttcataccaccagcaaagagaatgttaacattatcctgaaatttttaaacaaaaaaacccagctggccgggcgtggtggctcaagcctgtaatcccagcactttaggaggccgagtttggcggatcacaaggtcaggagatcgagaccatcctggctaacacagtgaaaccccgtctctactaaaaatacaaaaaattagccgggcatggtggcaggcgcctgtagtccggtcccagctactcgggaggctgaggcaggagaatggcctgaacccgggaggcggagcttgcagtgagccgagatcgtgccactgcactgcagcctgggtgacagagcaagactccgtctcaaaaaaaacaaaaaacaaaaaaatggtaagacaagagtaattgacatacattaaggatatacagaaatcttgatgttagtatttggaattgagattcttycctcttatttatttatgcctttatttttccatctgattaacatatttgttaggtactctgtttccagtagtagtacagatacatcatgcagctcatcatctagtggggatacataatatgatatcggttagcctcaagtctcagtcttcagagcctcgcttcttattgagttacatgatatttgaggctgsaattgttttagaattttgcctcagcaccatggtcattttatggctgtgacactgcgtctgatgtctttcaaactctgccttaatctttatattcctttttattttttcatatttgtgtctgtctagttagctttggtagaactccatcttcagcatctgttgttgccgctcattccttctttccacctggttttaatttttagtgtcaccatttaaactacatgcattcttgatcctaacgtctgactgaatcttgattgccagcccagactgctcttayacttcccttcaactgttgctgcctatctatgatcctgccaattaattacaacgaagaaccttgtgatttgtacccttacttcatgacaaagcacttcacacgtggcagatactaaataaatgatactgcatagataaataaatctttctttgcaaataggaactcagattgtatctttagcctttcaaaatgttaagtatatcagaaaaaaattgttttccctgctaacatttgtttgtaattaaaaccacatgcacagagggattatggaactgcataatgagaatgtgttttaatatgtcamacttcatctaatacagttaattattctctgagtatcaagaagaaatattacatcagaggagaaaggataagaacaaaaagagaagaatcagtcctcccacagagaaagggataaactacctgttaactttttcatattctttaatttttttcctattaggaaaattgtgtagtacattggaaagagtcctgtggtcttaaaaaaaccaaagatattattttcatcgtatcaataaagttgagtacaattatattaaagatactcataattatatacattcaggattgaaaraagcgtttctcatttataactctacaatttcagaataagatgtacatttcagtaactcagaaaaattgttttcaatgcatgtttatcaagcatcattaggttttgactccayataatgctagtctctgactttagtaagtttttcgtaaccttacataaaataaacattcaaaaactaacacttcagtattctttttttttttttttttttaacttttaggttcaagggtacttgtgcagatctgttatatagttaaattgtgtgtcacaggggtttgatgtacagattatttcattgcccaggtaatcagcatagtacccgatgggtagttttatgatcctcaccctcaagtayrccctagtatctgttgtttctgtctttggtcttttgtttttgtttgaaatagaaatttattctcagaataacgcacaaaagcacacgttgaggctgctgttaggagatttccctcccttccatttcctccttctcctctcctctctgtatgccagggaggacacagttgaaggaaacgtgcaatcacaaacaatgatcagctctaaacacaaaaaagtttggtccaaaagaactcagcgtaattaatccagttactttgtagaatttcactaggtaggattaagatactgcagatgtagtgtttccaggagcggtttgtcagtgcaccaggggtcgcctgcttgagggagttgaggactgagtgcatacaggagacctctttgccctgcttgctgacttggggttacagtcaaamaaccgggccacctgttaccacccagtgcagggggatgactcgtcaatgtcatttacaaaatcttctgccctgtagtttgcctttcttttctgtagctgctcgtcttgtcttgcacgccattcttctagctcatttatcgctttttctttccactctgcttcttgcttckgagaataagcagcaagggctgctaagcattccattttctcttctttgcatctgcatatattttcaggctggatgggaatcgatccayttgtgaaatagctgcataattgtctcttggaccattactttcctggtagtagtcaccatcatcactccgtcaacagcatctggactcccagctgttcaccttgtggctggggcctgggggtgacaccatccaggatgtcgaaggcgaccttgttgttcttgatmcccrtagtcttgctctcttgcagtgccaagaaggccgcagctgggtcttcttcactggcgccagccrctccgttcccyaggacaggatccccaggggtgccagcagggacaccgaagggatsttgctcagccatgtcgtgcaatttaacgacacagacaccaacccaccaacaccatgcctggcaatcgtggctgtggtagtgtctgggagatgttgttcctttctttgtgtctatatgtactcagtgtttaccacccacttgtaagtgagaacatggctctatttggttttctcttcctgtgttagtttgcttaggataatggcatccaactccattcatgtttctgcaaagcacatgatctcattcttttttatggctgcttaatagtccatgtgtgtgtgtgtgtgtgtgtgtgtgtgtgtgtgtgtgtrkawawatatatatatatatawgcatgccacattttctatatctgttctaccattgatggacatttaggttaattccatttytttgctcctgtgaatagtgctatgatgcacatacacgtctgtgtgtctttatggtagaacaatttatattttttggggtgtatacacaataatgggatggctgggtcaaatggtaattaattctgttttaagctctttgagaaatcgccagactgccttccacattggcagaactaatttacactcctactggcagtgtataaactttcttctcttccacaatctcgcyaaaatctattattttatgtctttttaataggcattctgattggtgtgaggtagcatcttgtggttttgatttgcatttctgtaatgattaacgctgttgagcatttcttcttatgctgtgggccacatgtatgtctgcttttgaaaagtgtcggttcatgtcctttgcccacttttaaagggagtttttttttttgcttatttaagtttcttacaaattctgaatattagacctttgtcaaatgtataatttgcagccactttctcctgttctgtaggttgtctgtttatgctgttgataacttcttctggtgtgcagaaactctttagtttaattatgtcccatttgccaatttttctttttcttggagttgctttgagtgtcttcatcatgaaatctttgccagatcccatctccagaatggtatttcctgtgttatcttctaggagttttatcgttttgtttttacatttmagtatttcatccatcttgagttgatttttatgtatagtgtaaggaagggatccagtttcagtcatctgcatatggctagcaagttatcccagcaccccttactgaatagggaatcctttccccattgtttgtttttgtcaggtttgtcaaagatcagagagttgtaggtgtgcagcattacttctgtgctccttattctgttccattggtctgtgtgtctatatttgtaccggtacaatggtgttgtggttactgtagcattgcagtatagtttgaagtctggtaatgccaaatgcctccagctttgcccattttgcttaggattgccttggctattcaggctattttttggttccatatgaattttaaaatagtttttttcctaattctgtgaagaatgtccttggtagtttgatagaaatatcactgaatttgtggattgctttgggcagtgtggccattttagctatagtgattcttcctaatcatgaacatgaaatgtttttccatttgtttgtatcatctctgatttctttgaacaacattttataattatgaaatatttcagaggtcttttacctccctgataacctgtattcttaagtattttattctttttgtggcagttgtgaatgggatttcattcttaatttggctttcaccttggatgttgttggtgtataggaatgctattgatttttctgcattgatttactagcctaaaactttgctgaagttgtttagcagatcaagaagcttttggacagagactatggggttttctaggtggagagttaaattgtctgcaaacatagatagtttgacttcctctctttttattttgatgccttttatttcattctcttgctggatttctctggctaggacttaacagtaccatgttgcattggagtggtaagagaaggcatctttatcttgttccagctttcaaggggaatgtttccagctttgcccattcactatgatgttggcagtgggtttttcatagagggctgttatttttttgaaatatgttccttcagtgtctagtttgttgagggtttttaacatgaaggaatattgaatttttttttgaaagcctttcctgtatgaagatgatcaggtggtttttgtttttgtttggtttttgttttgagacagagtctcgctctgttgcctaggctggagtttagtggtgtaatcttggctctttgcaacctctgcctcttgggttcaaacaattctcttgcctcagcctcacccaagtaactgggattacaggtgcttgccaccatgcctggctaatttttgtatttttagtagagacagggtctcaccatgttggccaggctggtcttgaattcttggcctcaagtgatccacccaccacggcttcccaaagtgctgggatttcaatcgtgagccaccacgcctggcacatgtggtttgttttattagttctsttatgttgtgcatcacatttattgatttgtgtatgttgaaccaacattgcataccagggataaagactacttgatcatggtggattaactttttgatgtactgctggatttagtttgctagtattttgttgaggatttttggatccatgttcataaaaaaatattggcctactgttttcttgttttgttgtttctctgttagtttttggtatcaggatgatgctagcctcatagaatgagtttgggaggagacccccccccccctttgttttttttttttttttttttttgcaatagtttcagtgggaatggtaccagctcttctttatacatctggtagaatttggctttgaatccagctggtcctgggctttttcttgttgttaggctttttattacttattcaatttcaaaacttattattggtcagttcagggrttcastttcttcctggttcagtcatgggaggttgtatgtttccaggaatttatctgtttcttctaggttttctagcttgtgtgcatagaggtatttgtagtagtttctgagggctttttttttttmtatttccatggagtcagtcgtagcaccccctttgtcatttctgattgagtttatttggatattgtctcttattttagtagtctagctagtggtcaatttactagttttccactattggactgtgtggttatgtcagtctcttcataggtctctaagaacatgtgttcctctattgggtgcatatatatttaagatagttagatcctctcgttgaattgagccctttaccactatgtaaagggcttgtctttcttgatctttgttgctttaaagaatgttttgtctgaaattggaataccaaactctgctttcttctgttttccatttgcttggtagattttcctccatctcttcacattgagcctatrgatgtcactgcgtgtgagatggatctgttgaagacagcttaccattggttcttgattctttatgcaacttgcttctttgtgccttttaattggggcatttagcctgtttacattcaaggttgatactgatatgtatggatttgatcctgtcatcctactgttagctggttattacgtagacttgtttgtgtggttgctttacagtgtcactggtgtatgtatttaagtatatttttatagtggccagtaacagtcttttctttccacatttagtactcccttcagaacctctattgaggtggttctrgtggtcatgaattccctttcagaaaaggatgtcttacttatttgcttatgaagctgaagttggctggatataaaactcttggtttgaagttctttttttttttttttttttttttttaaagaatgctgaatataggttgaatctctcctggcttgtagggtttctgctgttttaagccttattgggggtttcctttataggtgatctggcccttttctctagctgccttagcttttttttcctttcattttgaccttagagaatctcatgtgtcttgggatggtcatcttgtatagcatttcacaggggttctctgcatttcctgactctgaatgttggcctctctggcaagcttggggaaattttcacggatgatattctgaaatacactttcgaggttgcttgctttctctcccttacagggacaccagtgagtcgtagatttggttccctttacatagtcccatattttacataggttctgttcattctttattgttttttcttcatttctgaatgagttatttcaaagagccagtctttgacctctgagattcygtcctcagcttgctcatttgtgctgttgatacttgcgattgtattctgaaattctctgagtttttcagctctatcagctcagtttagttctttgttgaaatagccattttgtctttcatctcctgtatagttttattgtattccttagaatccttgcactgggtttcaactttctcttgaatcctagtgatcttcgtttttatccatattccatattgtatttctgttattgtagcctggttaagaaccatgttggccgggcccagtggctcatgcctgtaattctagcactttgggaggatgaggcgggcagatcgcctgaggtcaggagtttcataccagcctagccaacatggtgaaaccctgtctctactgaaaatacaaaattagccaagcatggtggcgtgcgccgttaatcccagccactcaggagtctgagacaggaaaatcacttgaacctgggaggctgcaataagccgagatcacgccattgcactccagcgtgagcaacaagacggaaactccatccaaaaaaaaaaaaaaaaaaaaaaaagattgttggggaactagtgtggccatttggaggtaagaagacactctggctttttgaattgccagagttcttgcactggatgtttttatcttcgtgggctgatgtcccttcagtcttaraagttgtcatcctttggatgagttttttgttcttttatccgctttgatatccttggggccttgattatggtataaggtgggcatggttgactggctttgattctggaagattttggggggccatggcttagctcaggactcccgagctgcatgccctaactctggggggctggtttcaggccctagctttgttctctggtccctcctgattactggagggggtgagttgttcccagattgctggtcacaacactcccatgagtggtgtcagccaaaatgcttcataggaaggtggcagtgagattcgtgctggttcacttacgccagcagcagcagcagtctggcagggtgcatgctcgttgcccaagctgaggtattgggtgtgctggtgtggtggcatccaagcatgtgtttgcaccgttgccggtgtcatagcaggggcagagatcttttgggcatgtgccctccattcacactgacagcagtggcagcgcagcgtttgcggagaggccactagtgtcagtgcagtggtggtgtcagtggaaagatcgggtacaggaaggcatgcagttagcaccatctgatatggtttggttgtgtccccacctaaatctcatcttgaattttaactcccacggttcccacatgtcatgggagggacccagtgggaggtaattgaatcatgggggtaggtctttatcatgcttattctcatgatagtgaataagtcttatgagatctgatggttttataaacaggagttcccctgcattaactctctcttgccaccatccatgtaaaacatgacttgttcctccttgtcttctgccatgattgtgaggccttgccagtcacatggaactgtaagtccattaaacctctttttcttcccaggcttgggtgtgtctttatcagcagtgtgaaaacggactaatacagtaaattggtactggtggagtggggcgatgctgaaaagctacccaaaaatgtggaagtgactttggaacttggtaacaggcagagtctggaaaagtttgggggctttagaagaagacaggaaaatgtgggaaagtttgtaactccctagagacttgttgaatggctttgatcaaaacgctgataatgatatgaacaatgaaatccagactaaggtggtctcagatggagatgaggaacatgttggaaactggagcaaaggcgactcttgttacgttttagcagagacaggtggcattttgcccctgccctagagatttgtggaactttgaactcaagagagatgatttagggtatgtggtggaagaaatttctcagcagcaaagcattcaagaagtgaggtgggtgctgttaaacgcattcagttttataagggaagcagagcataaaagttcagaaaatttgcagcctgacaaggagatagaagagaaaaacccattttctgaggagaaattcaagccagctgtggaaatttgcataagtaatgaggagctgaatgttaatccccaagacaatggggaaaatgtctccagggaatgttaaaggtcttcagggcagcctttcccatcacaggcccagaggcctaggaggcaaaaatagtttcgtgggctgggctcagggtcctcgtgctgtgtgcagcctagggacttggtgccttgcatccttgctgctccagctgagactagaasgggccaaggtacagctcgggatgtggattccgagggcacaagctccaagccttggcagcttccatgtggttcctgtgagtacacagcagtcaagaattgaggtttgggaacctctgtatagatttcagaggatgtatggaaacacctggatgtcaaagcagaagtttgatgcaggggtggggcactcaagaacctctgctagagcactgtggaagggaaatgtggggtcaaagcgctcacacagagtccctgctgggacaccgcctcgtagagatgtgagaagagggccaccgtcctccagaccccagaatggtagatacagtcacagcttacactgtgtgcctggatccctgcatccctggtgtgaaacccacttgatcatctgttcaggtggattatctgtttgatacgttgttgggttcagttagctagcatcttgttaaggattttagcacctacgctcatcagggatatctgtctgtagttttcttttttggttatgtcttttcctggttttggtattagggtgatactggcttcatggaatgatttagggagggttccttctttctctgtcttgtggtatagtgtcagtagaattggcaccaattcttctttgaatgtctggtagaattctgctgtgaatctagctggtcctggacttttttttgttggtaatttttaaattaccatttcattcttgctccttgttattggtctgctcagggtatcaaataagctaggagggttgcatcttgccaggaacttaaccatctctctaggttttctagtttaggcacttaaaggtgttcatagtagccttgaatgatcttttgtatttcagtggtgtcagctgtaatatgtcccttttcatttcttattgagcttgtttggattttgtctctatttttcttggttaatcttgctaatggtctatcagttttatttatattttcaaagaaccagctttttgtttcatttatcttttgtattttgtttttgtttcaatttcatttagttctgctctgatcttggttatttcctttcttctgctgagtttgggtttggtttgttcttgtttctctagttccttgagctgtgaccttagatggtctgtttatgctcattcagactttttgatgtaggcatttagggctatgaactttcctccttgcacagcctttgctgtatttcagaggttttgataggttttggctgtctttgtgagggtgccaagtgctggggggtctagttcgctrtcttgctacaactttctcaaatgcaaatatcttgaccacagaatcagaattgtattcatctttataatcctctctataaggctgcacatacctgttgaatgagtgaatgaatgagccaaaggaagtgcatagaaaatgaccagacctaatgggttatgtacattttattatctgtttaggtcataatgctgcctgtgttttcctatgtatttgtaaaatgtaaaggatttcgtttttgttgtcctgtttttggagtaacctgagaaattgttttagatttgttttgatttacgtagtaactagcagacttagctatatacaatgcaaagattattatttgtgaaattatttctagccatctaacaatatcagtatttagtctagttaataaattaccttatacagattatatcagagtttaatatctttgaaaagttttggacttatccaaaatatatttaatttggtttaccccaaactgtgtgttgaaatacaaagttaatatacaycatacaaatttaaaaacaatttaaaatattgctgttctttactataacttatactcttttattttatcccttaaaatgaatcttaaaaaatactattgaagtttataatattcaaagtaagccctgttcctaaaatgaattttataatagatgtctagcaaagctgctgtgttaataatgcaaaaatgctgtaattctctcccaaagaagcaattactgtgaaaatcaacattttatttctgccaagaagaaaaattactgtgttctacatcaaattctgcaagaatcagttaaaaactctgtaagttaggactttacaatttctttcagtaaacttatgaaaacaattatgaaataagtattaactatatattgtgtttgagacttgattttcagtttatatacttactaaatccttaagttataattttaggttcaaagtataaactcaacttcaacctcaggaatgcttttcccattatatgagactgcctcaaacctcatttatggttcagaaatgtctttattatgttaccgaggtaatctctacagcacctaaattgtttatactattacatctcagaatatttgctattaggtaattagagtatctgacaatattagatatttaggatattttttctgtgccattctctcattactaggtgaaaatgaaatgttttttacatatttgactttgatacatcttcattatgctcttttattgcttataaatagaaatcattatttttctccagtttgcttatcaataagttaacatatgaagttctgaaagcatggaccattctctttttttcattttttttttttgagacagggtcttctcctgtggcccaggctggagttcagtggcgtgatcacagcctacttttaacttcaaaatcctaggctcaagccatcctcccacctcagcctccttagtagctgggactacaggtgcatgccactgcacccaactaatttttaaaattttttgtagagacagggtcttgctatgtcatctaggctggtcttggactcctagcctcaagtgatactccagcactggcctgccaaagtaccaggattacagaggtgagccaaccatgtgcagccatcttcagcctattttaaatgaacaattttttaaaaatacactgtaaatataactagcaatcatttaactgtaacaactattcagtgaattgtaatgtatattttattactggtaattaattcattaataaaggcattctcattttagaaaaagtgtttttcattttctcctwgcactttcattcaccatagttctcaaaacttgcaaacttttagactgcactctctcaccactgtttcttgctctgtctgtactgtttcactgatggtagtgaaacagactacttggattttagtgtccacctgtcagtattcaaaatctaacataaaacctagcattaacaatggtaatatgatctgatgtaattgatgtgacttttaaaaaatgctgtttgctccaggaaaaagattatatgcagaaacttatttccttattaaataatacttgtattttcaaatgaactttatatcctgatagcacatgacattttccctttaatatgagtttgaaagatgaggaagttgtataacaagagtgaaaagccattggaatactttgttgcttgttagatttagtgccctttacaaagagtatggactttttttaagcgttgtacaggaaaagtctaatttaatgttttataaagcacttagaggttaaatagaacttttaaaatggatttcttttgaccaagtgattatcctttcaacaagtgctatagaaggaagaattatataagcatcagcaaaagcctctatrtaatgtcttgctagcccattttttataaacgggacttgagtcagcagaaagggcattccaatattgcaacattagaatctttttataatctttttattatctacatttgaatagaatctattattatagagattaaataccctgtcctgtgtgtgttccttagattgaaaacaggacaagattacagtgaargcatcagcttagggtatgaaattctgaatccaaatacatttcaactccaaataatctctgggtccagaaagccagttgcactgactcagaaaaaagtttatcatgcttttccaccagacagactcacacttcaagtcatttatttaattcaattcaatgaataactacggtatgcttttccctctgtgtagctctgggggtgtaacagtattctgggctgaattcctgtatttgtgaagttcataatttattcagggctgcaggtgattctacagttaatttctgatagaatatgagactagctataatcataatataagcaaagtgctgtgtgaacagagtaagtaggagtgaaagagccttttccttaggctggatattgtaggaaaaaaattaaatttcttcagttaatggacaagtggaaaataggacagaatgaagaaaggccatatgccttgttgagggaacagagagtaatttgatgtggttagtgcctgtgagtgttgagaaatgaggctagaaagataatttgttactagattatgagggaccttgaaagctttgtggtaatttgctcctaatcatctgagcagtaggaaatcatggaatgatttgaagaaagagtggtgttgggtacctaagaaactgtttgtttaaagagacagatgtctctttcagtgtttgtctgaaaaataatgtttgttgtcccttttctggtcctttcactagagggaatggctggagctttttttttttttttttgctttgcctgttggtgtttctgggttgtccacttctccagtatcatccagtccaggatatgtgaagtgaaaatcattgtgttagtccggaggtccctattctgtgtgctttcttctctctacctttcagaatcttcttatgtttgttttatatgtgatgtccagggtgttgggcagtatttaactagagggacaaacacaagtacatccatcttgtctggaattagaaatcttaaatggactttaaaaaaatgttacagaagtaaaatgtacaaatagcgtaatacacagatcttaaatgcctattttaataagtgtatatttccctgtaataatcaatgtaaaacctttttattcccccacaaaatttcctcagggcctcttgcatgtatatctgccattcctcataggaagccactgttatgatttttatcaccatagattaccttgcctatgcttgaagttcccataaaatgaatcacatagtatgtgtctggatagttttacttaacatatttttgaaattgaagatgatttgtaaaatactgtgtatgtgtgtattttttactttaaacatttttaagccatagaataatattaccagaatagtgtttcaggaaggaagttaattttgtagtcgatatagtagctgttttgggtttgggggttgtttgatggttcattatagaagtagatgcatagagatgttgaattacccacaatgtcatcaatctgttaataaaacaaagccaaatgtattagaatttaactgcagtaagaaaaactttgcagtgtttcrgaaggaagaagtagaagaaggatatttatagggctttgggatctgtgctgaaatggtttaaggtgggctttttaagacaggcagcttatgtggattaggcaaattctgtgatggaacagtttaggtttgttggacactgaggcaagagtcttaaagtaagctgtttatccaagttgtatggactgttgtctctgataaattggtctgtgagaatttcttgaagcaaacagtaggttatttttttggtttacagtcttatcctttgccaggcaaagatttccttgaataaactactaagtcatgttgacacagatggtctcagttctcagagataagaggttgttgatgaatttgaggtttttaaggccactaccaaggtaatggaaatgggacgagaatggaagagccattatgtaagagaccagtcacggctgtgtggagaacgaaatcaagagagcctattttcttggcctgatggggcttccttttgtagactctttttgtttactctggcatttactcttaaaagacttttcataggtacttcagatggaaragactctaatgttaccaaagccagaatcttctgtttgagtaagaaacccttttgtaaacattggtattaaataatagttgttgagccacttcttaaacaatttagatagggaacttgctttctcatgagacagccaattttagctttagaatgctttatttgttgagaaagtgtttcatatatggagctgaaaactgtttctttgaaatgcttaatagtgctttctttcctccctctggaatctcatggtataaataccttccaaggttctcatatcagctgaacaaatatttgaggtgggtgttcacactgtactctctttctaggcaacctgtttccagctctttcagcagtcatcatgccacagattggtagtgtctccctatcctggtttctgttctctgctttgctctccagtttgtcggtgtcaccattaatacctgcagcgttcaagttgaatactattctccagatgcattctgaacagggaggagtggaagtattacctttttttctgtgtaccagacttatattacttaaaataacaaattgaaacaaacaaacaacatcaacaacaaaaaatacaactaacttctctttagcttttctaatagcttcatcagactagaaactcatggttcacttggtttcagcattgctaggcatagttgacagtgattgagagtttcagaaagatgagctgaaattgtttacgtgcatgatgccaagaagtatactgtcccagtttactaattaaacaaacaaaaaacaccacacagtcgtgcaatggaggtagtagtgaggctatcttcttattgtttgtttaacttagactctgctgtagggaaaaactgctgagattctttcatgttgattccccaaatgattacagaatctcattttagttgcatagcttgctattattagggaagaaagtatctttctaaactctttatgaattcaagaatgttatagagaaagtatcaggggacattagtataggtataaactttaaagagatatgtaacttgagcctaattaattatagattataatattatggaaatagaggtaaaacaaataacatattccagctactctatactttcaatttccttttctgaacccttctaagtgggaattttttcttcaaatttaatgtactttgggttgcagttgagttggagaatttgaagtttgtcttgtttttaacattttttaaacattcattagtgatattgaaaataacagctttgggcagccttgttgtctttggccatttgggttgttataaaggaatacctgagactaggtgatttataaagaaaagagttttatttgggtcaccattctgcaggcagtacaagaagcatggcgccagcatctgcttctggtgagtgcctcaagctgcttccactcatagccaaagttatggggagccagcatgtgtagcaatcaaatggcgagtgagaggagtgacgtaccagattctcttaaatcatggaaactaatagcgggagaactcattcrttactgggagggtggcaccaagtcccccatgatccaaactcctcctctcaagccccacctccaacaaatggggatcacatttcaacatgagatttggaggggacaaacatacaaaccatagcactgtattcattagctcattcgctcagcaaaagtttacagagtgtctgctctatgctgtcttaagcagtctggcttggcgcactgcaaaataagtgacgaacaaaatagataaagcttataacctcaaaaagcttttattttagccaggggacacagacagtgaaaaagcaaatatgtcaggtggtagtaaatactttgagaaaagtaaagcagagtgatagaaggttgaggagaatgcttttttatatagggttctgagaaggcctatctgaaaagaagtcatttaagcagagacctgaaggaaatgagagagtgatttatatagtatcggaagatggaacagcaagtgcaaaggccccaaaatggaaacattcttaatggttttttttttttttttttggaatagcaaggaagccagtatgattgtagtaatgagagtgaggaagagagtggtagatatgattagagtgacacggtgctgtgctgtggggcaggggcaagagcacaagttgacatgtgttctatataagccttgtaaactstgttagggaccttgaattttaatctaagtgatgtggaagccatttgaaggatatcaagccaaggagtgagataatctgacattttaaaaatcacttatttttgagaaagatagctacataactttattggttctttgttctcgttcggtttatgacaactactaaactagactgtaacgctggttctccacagaacacataaataccaactaaaggaaactttcttttttttccttttctttttctctttcctaacccactgcccctgtgtctgtctgtacatccaatcctatccctctttttcctttctgcagcagatatatgatgcttgggatgtaaaaagaatgagcattgtttgctcytatattgaccctgacgagttttggaakargaaggatcgttacttcttacgtttgattttttagataaactggsaatcaaaagggttaagtgatttgcccaaaagcacataacaagttaatcacaaaacagttagaacccatgctggcttctttgttaatcctgtattctttaaaaaaaaaatagtccttattatttggaacacttgttatataacttactaggtttttctctgtggcatctcatattttatacctttattttattagggtattattatttatgtctttgtattttcatgacccatttcttcaaagataatgtaaaatgccctgggtgcatgattttttttttctcggaccttcttaacggcaggaattagagccrtagttaccaaaacaattattctaaagaaagagtacagagacattgatttgatgatgaaaggaagcactgctggaatgttttcttggcttcttatgatgagtggagtttcacagtggtatatttgtttaaaataaaaaagatttactttgaacaaaaactatttaaacaagaagactgctcaaattattgttatggaaaaccactccagaatctattcatttttatgaaaccatttgtagaaatcagaatgaatatagtattctattaaattagattgatcacctaacagtaacgtgtagtgtatataaataaaaatttatataaactctgaataaaatattttcttgtatataaccaattttggtgggtaatatgtcagagctacaagacttacctttaaaatgattcttcacaaagcgctgatagcttgctctgataaaagtttctcagaaggctgaattccaacatccttgagcatggccctatgtgatagagtggaagaaagaaggtctttgtgcatctcttcatctcttcaatatttagtggtctttgtgcctctctcctgcatagtactgcttcagyccaatgatgatggcaggtgggtcatcttcagtctgtcagagtttgtaggtattacagaaatagcttctcttttggttctcatcccctccttcatgctttacaacttacatattatcagataaaactgtgccgcctttcctgctagtgtaccttgaatctctgtgctgtgacgtaacagaggcatccattttacatacttgttttcttayattttagaagtttggattttagattccagttaagtactctttaaagatactcatattatacatggttggatctctcaaattttagctgtgagtctgacaaaaacagttaccctttgtacctaattaaaccagattgtaatctagagacagggstgttaactcctattgtctcagtacttctgatgtattataatattgcatactgtttccctaaattttcagtaaataataaattactattattgcatatrtatggtatattttggtatatatttrtgtgtttgctgtttattttcatttgagagtctaatagtgttaattctttgtatttatgttgtcaataagtcaattaaggaagcaaaggaaaagaaagtgttatcttttcaagagcagcattctattttgcagtgctttcctcaggaaatgaaagaaagatttctcataatctaacaagaacatccaattccatkttaaaatattggttttaagtaagccaattaagaaagaacccttcaaacttttcacatgactttgctattatcattcagacagatgtcagagtcataatatgaatacttaaaaagggtttgaagtgttaatagaagaagcttccactctgaaattctatttgcaggagtagagaaaagataacagtattatcaatttcgtgtagctcatactgaaatgtggattttaatacaagatgttaatatacgaataaatatttcataacttgaaaataaaataattacgccttctgtatgggtgaaacaaactgcattgaactcttgattgtgcaaatatgatcacgagcattttctaagcactcttccattgtacaatgacactttaataaartacttgtagagaagcatgtatttcagctatcaactttattcttttactattttgtccttttaaatttgggaagttaagttgtagggcgcaagaagttcattcagccacccagagcaacataaaaaactgataattaggaaaatgctacttttgatcattgaatcatattataagtcatcatttgttgctataaaagtatactttatgggttttggactccatgtttttacctgactgctttttttgagttactatgtctcaaagctttatcaccatgggttagtagtttactaaaagtctgtgaaactaacctaattttatatcagatggtatatttgagagttagtcactttcataatgcctacataaagtaattgaactggtaatgtaaatgcatatacagctaaaaatgcttatgccaagctattctcagtaagctttaaaatttacatttaagaaatctgaaatgtggttatgttggacttttgtttcctgtcctgaacttctgcaataagcattgtaataagagtcacatcatatagtctgtcttttcagtgattgaatacaagagaagaatgtctaagttttgtgccctatgttttttaaacctatattttttatgttttagcaagacatttttgatcatatattgtggcaaacaccaccactaaataccagaaatcaaagcacaagtcatttttctctcttgatgttttcccaggcctgtaggggaaatgatatgtaagtagacaacagccatgcagcttggtaacaatcaaatataatgttgaatatatttctgcgggagcaaagatggaacagcagcttattgcctagatgactctataggagatgtggaatgggaaatggaaaagctcagatgtttacattgaagtgggaatttgacatgtgcatccctgggtgtgtgaattttccagggctgtcacaacaaaatgccacaaaccgggtaactttaaaacaacacaaatttgttctctcacagttcaggaggctgaagtacaaaatcaaaagattagcggggttggtttttttggaggttctaaggaaagaaccatcccatgcctctttcttaggttctagtagttgctggcaattgctagcgttccttggcttgaattaatagatgccccactccagtctttgcctccatcttcacatccccttcttctgtgcttctctttgtatccttttctgtctcttataaagttataaagatactctcattggattttgggccctcctaaatcctgaactaattaaatctgtttccaaataaggtcacagtccaagttaatttttggaggaggacatcattcaacctcactacactgggcagagtagcataagaaagtaaagaaaatacccaaaggcctagaggtatgtaaagttattggtagattcaggataataaatgtagaggaaatggaataaatggagtgtggaggaatactgagaaagttgattgggaatagattaggaaaaaccttgtgtgtcacaggaagatgtttagactctgctgtaggcatttgggtaccagaagcctgtaaacctttgaggtgcatgagcagatttgtattttagaaaagtgacacacaaaactgaaagacttaaaagactagtctgaagacagaagtaacatataatggcttcctaaatgaaagtgtggtagtgatttaaaagtgatgattattaaacttcatctgtggttcagtgagcagtgtatagagagggttgaaatgattttgagaatgctttgggaggcaagttgataacatatgccataactaagaattttggtggagaagaaagataaaacattcaatttttaaacagagaattgggttaaacagtcaatcaacgtttatttaataatgctttctgtctagcattagtctagatactttggagattataatcatggcttctatttcaagatctttacaagatacgtggagtcatgatactgataaaagtgaaacagaaaacagtccaaatccgtgtgtaaacttgatgattctgactgataaatacatcagaatttcagattaggaaaagatctgtgtggagttaggtgccataaaaagggtttcctgagtcttatgtaaagtaaattaacaacttttgatctaaattgacaaagtagtacttaatttagatttgataaattatatttgaattggttcaaaagaagatagaactccaactaatagttgatcattaagcttggaaggcagatataaaaatggtgtttttgtacaggaaagatagcctgactagaagagagaggatagccaaatgttagattatattatgtttgggaaggtatactgcatccaacataatctgtcttggaagatcaggtaggtaaatttgtattcactgcacaaataattagttactgttggaaaaaagtttttctgttagtaatattagctcaacagtaatatgtagttctgttattttttagaaaataaaaaagattggaggaatgccaatctgaaagcttttaccccaatccaagtatgagataagtcctgttagagaaattagattttgtatattttgactacacgtatttcctcgttctcctttggctgattgaactagctctagttaatccatattcttatatgtattttatgccttcttcatttttgctcctctgacttactcattattcccagccagaatttagctccagatgaagctcccattgagccatttatatactccatatctaagagcacggggaaagcttgaatgatgtgaaaatgtggatgatgaggaggaggatgatgatgatgatgataaattacctttaatgtgttaggagctgtatgtgttatctcctttagtccttawagtatccttatatgaaattgccactattatctcccaattaggtaaggaaagtatggcttagagaggttaagtagcttgatttaaatagggttccactgcaactagacctgtctaactgcgtagtccagattcctcatcactttaatatagcatactggctcacctacatcttttccttgttgcagtccattacattatggcactcaaattcagcttcctaaattgacctacagtcacatttcctttctattcaaaagtcttctgtgacttccttatacttaacaaaattcattatttctcccctattccaggatccctccaaatgtagtgacagcctcttccctcctggtggacttatctacagtctatactgttttttaccttagtgcgctcccctccctgcccttttcggagtcctacctcctttttcttctatttgctgaaatgttactttaggttttgtctggaggctagaatcatcctatgatgatctctcccaagaaactttgtctgtttctccacccttcctcttaatttaataatgctttatttgctaccacttatgctacctaattttttgcttggtttgtagtttagataatatatagttatttaaactggaatgtaaacttaaatttcttaaagtcagaaatgattgtttcctcatttttgtgtcttctagtatagggcctcgtgctatttaagcctagatgaaataaagagtgagagtggaaatgagttctgaccgaacaagggccttcattctacagtgagtaatcaatctgcagtttaaaataagcagattcattgaatgggccacaaattcctatggcaggaaaacatagctgacatgaaaaaggaaacacttgtttacctctccactgtcatttttccagttatgttccagaggttggctgagcaaacccccaggctacttattaaaatgcagattgcagaaaatgggacctagaaatgcacctttgtagcaagattcccaggttatttgagtgaaatttctacagaaacatatataggcataaaaatgcacaaatcataaatgtgcagcttagtaaatttgcatgaagtgaatatatatatttataaatatatatatttgcatgaagtgaatttataaatatatatatattcacttcatgcaaattactaagctgcattatatatataatataaaatatatatatataaaaccagcaccaaatcaagaagtggaattttgcctgcattccagaatttcacttaactttgcagtcagttaactaatctgccacccaagtcacccctcaagggtttcctgagtcttatgtatagtaaattaagaacttctcatctaaattcaggcttgtctctgataatgtagacattaaaacagtagtccccaaactactacctccgttttcttcgctttcccttttttttcttgtcctctcctctcactaccagcattttccttggcaataaaaagtaatgaaacacttcttctgaaaaattcctgtaagtctctcctcgatgttgatctacttaagctgaggcagtattttaagggttctctcccttcttttgtaggattcctagaatttcttcattaggcatagaagattctgctctttttttcaaatattatttagaagattgaaaggataaacataatttcaaaggatctgtgccattgataatttagtttactttttctaaaccaaaaacttatctcagaaaagaggttaccaggttttagaaaaacaaaaaggtacgtgtgtgtgtgtgtgtgtgtgtgtgtgtgtgtgtatttaatatgtgtgtatatatatatatttaatatatgtatatatatttgtttaaatcgcattaatgccttaagcattaagattcttaactttggaatttgtgatagtttagcatcatctttagagaatttaccattgcactgtgtaggcatggtttgctaagcaaattaaggatataacctgttttgtctgatttgcycaagaaaataactttttgtgaacaatagtatcttgattgtttatatccataaagataatgctataattgcaaatatattttacctgtatatttaagctttccacttgagaattttaattgacaattagaattactctatagtttcagagtatattttaaaatatatagcttcctcctccctgccacccccagtttgatcgtcacgtttttactatagtttcaggaactgaaaggaaataataaccaagacacaaactttatgaacttcatgaatattattgttgtgatttgttcagaccttgatttttaatcttttccttccaagaagaaaacatactaaattgctgtgcacagtttcgtcacataataatttttattttctaggattgaatatatcttattaatagtattttcagaaagtacaatcttattttacaagtattgtaaaatatttcaaataagtaatagcttatttgaaaaataagattagaggctcttagaggacttttaaagattatctaattcattcttcgtcttcagacatgatataaatttccttgttttaatgcttttgttcagagtactcatgctgttgattcttttagcaaactatctttgtattatcatttttctgtttaacttctgtcactacctgttcattccacttaacctgctcttttcagaactatttgaaacctcatgaaaacatgtaacagttccaaaaccaagatcttcaacttgaaattcacatcgagtttaacttcagtttctccccttctcttattcctgcttatttcgatctttattccttaaccgttttattagatctcttttatgttcctatttccatcaccccttttaaaaaggatttacgtggtctccaaaggacactaagayttccttctctagaatctcagtcctctttcttttcaaccgtctatcttcttgccaatccccaatccttttaagctttactgcctactttgctgctgcttgtaaaatactgtagaaagtcagaaataacgttttgatttaatacattccacagtgtttgctcctaaagtttctcacctgcacacctttattctagtcttcacaggtcacagtaagggtcactttagatgaccttatttcctatgtaaactaaactactacaagagttatctgtgtccattaagtttcttcatttctggttcactcctcggtacagttcagtctggctcctttatgcgtagctccattgataattacactctctaaggtcaccagttatttccatgctgttaaatcagttggatgtccacagcatttataagtaattcttatttttctagaatattgtaaacttgatggcaacagtaaatatttttgcttttctttaaagaacatgttgatcccaaataatccacaaatacgtttttgtaaaagtcgtaaaaggttgaagtaatacataactatataaaagaaaacataaaagcctccctttcattattctcttccgaatttatcatactcattccaaaggtaacagtggtttacagttttatgtggtttcttctcatttattttctgtgcttttccacacatatttacacttgtaagtatatataatacatgtgtttaatttacatgcttgtaagcatttccaattaaaattacatttttaaaagtaaaatctaagcatagtgttactgtcattgttcaaaagaaagctgacartaaacataaggcattagtggcatcgattaaaagatcttaagaaaactagcagaatttttgtcagttgtaatagatatattagtttgctagggctgccataacaaagtaccactcactggatggttccaacaacagaaaatgtatttgctcaggattacgaagcctacacacatccgagacccaggagtcagcagggcgagtttgaggtctttcctcttgggttgtagatggctgccttctcctccctcactcttcccatggtcttcactcagtgcatgtctgtgtcttgatcttttttttataaagatgccaattatattggattagggcccatcctagtgacctcatttaatgacctctttaaagaccctctcaccaaagagtcatattctgaggtactgggggttttggacttaggcatttttgggagggactcaattcagcctctaacagagcaataatactcagttgacatttgttaaacatatttctcatgaaaataattggtcacttattcacaaccgtggcctcatttgaaaagtacttaagcaaataccacttgcttgttaatggcttactgattaagttttattttagtgaaagtgcgccttgaaggatattacctcttcattgaagctacagacgtcttacacaattaagaacaacttayagtaacatctacctctttactcagcatgagatgtgttattggtggtacaaagcattttgaagacagtctgtataaattgcattatataacttaaaatgctctgttattggaatatgaggatagaattttgtaaccctttacctcaagcacacttataaaggatttgaatgattaatccgtaaagtaaatctgtgtaaataacaagtgtagcagtatatatgttgtttttaaattttgatttttgaaccccaattttgttgaagttattatgccatcatcaaaagatagaggattgaaaaaaatgacatctcatcgctatttccagccagaaagtgtttgaattatcacaaatttttacattacaataaaggcactacattttatatagttgttatatttggtagtttgtaactgctggaagtggttattaaagagaaactttagaggtgataccaacatggttctgaaatacttgtactaatgaagaattgtgagctatcttaaaacatctggtattaatccagatatttcagtactacataatttccaaggttatacttctttcttagtaggaatgttaaatatacaatttcttgtcctctgtctgctagtttaaggtttctttcagtttgttcagtttgataaagaatcagtaaacttaattgagaagatgaatgttcaaaagaaagatgtatattaaacccagagaatgtctgaagtgagagctacataaccaattctggtagatgttagttttatattttcagatactcagaactgaattttacattttattattaatagctctcttggtaggatttcttcctctttataactctttataattttaaactggattattttggaatctatgatacaacggtaacagcatgaaattgcatattatacaacgttgcatttgaatgcaggtgtcccttgacacttcttgattaaacaagttacttaaccttttctgtaaaatggaagaatctgtacacctcaaggtttcttttttttcctgttctgataattaaattaaataatctttwtacagtccaccctaatccaagaccatcattcagtgcttgaaatctcagatagtaccaaactctatatatattgtgttttttcctaaacatgcataccaggatgaagtttaatttataaattaggcacagtaagagatgaacagcaataattaatagtgaaatagaacaattataacaatattctgtaataaattatgttacgtggatgtggtctgtggtctgtctctcctttaaaataccttattgtactatacccactcttcttcttcctgtgatctgtcaacctgataactgagcaacccactaagtgactaatgggaaggtagcatgtacagtgtggatatgctctacgaaggcatgattcgcagcccaaggaggacacagcaggatggcatgagatttcatcacactactcggaacagcctgcaacttaaagcatatgaattgtttacttctggaattttccattgaatatttttggactgtagttgacagcaggtaaccgataccacagaaagtaaaaccaaagataaggggggactactatgcatttcctgatgtaaaacagaaaaaaaaaaattatttcacatttttctagcggtggtctctattttagaaaaaaaaatgcttccagatcataaatgcaaaactcgtgggcatacttttctgtggatatgatggaacgattctcatttgtttttcctaaggttttccaaataatatttccatgaaaacgtatctttttttagtattgaggtatgatttatatacaaaaaaatgcaaagatcttaaatatgcaaygtaaaatgagttttgactgtgcttacatattctaatggaagggttgggtgtggtggcactcgcttgtaatcccagcacttttggaggccacggcaggcggttcacttgagataaggagttcaagaccaggctggccaacatggtgaaaccccgcctctactaaaaatacaaaaattagcttggcatgatggtacacatctgtagtcccagttactcgggaggctgaggcaggagaatcacttgagcccagtaggtggaggttgcagcaagccaaggttgtgccactgyactccagcctgggcgacagagtgagactctttctccagaagaaaaaaacaaaaattctaattgaagttttgtgaatgttcttgttttcattaatacatatttctgattaaggacaaatctgagggatttcgtatgaattaaccagcttaaaaaaaaaagccagtttaaagaaaagttgttcagtaagtatgattttggtgtttgcaagtcagtgtaacatttttgaaatctataaagaaaaagagttgtgaaaaatggaagtatatttgataaaaccaatttatgggtaaaaaattgagtaagtgtgtataagtatgtgtaagtgctcccttgtaatacacygatacacgtgtgatacattaattactaatgacgaaatatactttgaaatctctggagaaatattttaattatatgctaataatatgtactaactacgaaatatcaatatttatttgttaagaaacttcatttacaaaaaactgcttaccgaaaaagaaaatcattttttaatgagctcagtgtaaatacgaaatgagtaactggttttattaattttaaagaacatttactatatagttatttaaatcatcactttttctctactatttatacgatttttttgagtttaagtgttcttcatacccttttgaggactttagtaatagcttcatttgagaaattaaaaaaatagagaattgtaattagatgctctgaattaaaatccctgaatattttactgtagggtttaaatgtattgtatatttagttgttttaaaatatattgaaggatgtrtttgaaaccagttctcttttatggtcctctgtaactaatatcattttccctacaatagacagaattctggacttacgacttgaaaacaacgctatgacattataaatacgtatgtttaaaatacaggtcaaatgttatagatagtaagtattggaatagtttaatagcaataaatattatcctgaggcagaattttagaaaaaaacttcattaaaggaggtggaatttgaattggccttaaaatcaaggtgaattttggtttatcagtaagacgaaacatcattttttgagatgaatcaggaaaagagatggaacagccttaagaacctgtatagaggtcaaaatggggataagattgtttgagagtaacgaagagactgcttttactgaaatatgtgattttgttcatagaaatgtaaagaaaattgtacataatctggtatcccaatcatatctatctccagactccttcccagtaagatcagataaacagttttgctttccatcctctattaatttccttgtcacactgtacctgtttgaaatcctgttgcagtattacgtacttatctcaatataatctacattaaaatattctgtttatagttaaccatctttggagtctttccatgtcagcctactgtaatttcaactttttatttctctagcactcatttggacatatagctaaattggccaccaaaattctattcttcatttygtaccatgtaacttaattgccaattttattaatttgtgatctgctgaatcctatagcacctctcaagaagaaaaatacttttatccctagttacaaaggaggttaactcaagcgcagattcacatcatattctgctaaatcttgagtgttaaacaaaatacttaaaagagaatgaagattctattttgccttgcatgattagacatttttaagtatatatactatgtttccttttgagccaagacastatgttttgtattgtgttttgcattttatgaaacagaatatctaagtactagatattgattgattgattgattcaaagatgtttgacatagattgccaagggttttgaattacctctaaacaattttaagttttcaaatgtttgtgagtaayagattgatgaaagtagtgattttggaagatttaactagaagtgaggaattggaaagtaaagattagtgataatccaagcgtgatacattaaacattcagacagaatcagttgggtcaaagtaatagaaaagtgrcagtagagaataggaaatgcccgttggctttgtgatggattgtaaggtagaggtgccgaagttgaagcttaggtcattagaagaatggttgtaatattgatagatgcatagagtgctggaaagataaatttgtttgcatggagaatattgacatttatgtgtacagttttgattttagagtgttaggacattcaaatgggatatcaagtcaaaatgtagtcaaccagtagttacatcataagatgtgaaaatatasacctggctgggatgggatctttcatgtaaaagagctgttgaatttaacgatacacatcttctaaaggagagaaatataaaaagagaayagaacttcatggacaaataatgtcatgtatttttcttataattaacatacaatttaccattttggtgacctctttaattttcataaacttagatatataacttaygttgattttatttgaagttcatatatcctcagttgaacttaaatggtctatatttgtattactacaaatactcaaatatgtgttyactgtgaatttggacattaaaataactaaatctttactatacatcctatcagttttaatgttgttgccttttgtataaaaacacacagtaaacaagaaatcttgtygttcttccttcaaatatgtacatatatatgtatatattttttcctttaaaatatattcaggatcagatcacttcttaccacctgctccaggataagatcacttcttaccacctgctgtcaaactgctttacgtcatcagcatcttttgtctggattactgtagtaaactttccctggtctccttgcttctrtgcttgcttcgttatagtctgttcttgacatagttcatgtcactcttcttacagtcttgcttttatgactcaccatgtaattcagaataacatctaagtcttcaccagcacattgaccctcttacatttccttgaacatgtttctatcttaaggccttcatgctggccattattccatctctcttatatgtgcttcccccagaatccatgtgactaactgccttgccttgttcacaactgtgctcagatgccaaagatgtctctgtggtgtttatcctgaccttcttcctatttaaattgcaacctgctccccattgtcaatacttctgactcccttacttttttctgcttttccttttcttacagcactttgcacttatagtatacagttcatcacacacacacacacacaccacacacacacacacacacacacagccccatgagactagagatcattgctttgttcactattttatctcacctgcctaggaatgtaacttgccatgtattagacactcaataaatatttgtagaataaataaactaacatacaacaacagtagctaacactgaaggcttatgtcacacttttctaaaaactttaacttattataactaccttaatgaagtagagatccttccatccccatttcacatgccaggaaactgcgccatatgttgcctaaataaaaagctcaattctacacagaattcaagcctcgcagcctggtatggagccagagatccaaatcatttgtgtatgagatttctgttaaacatgagtattgtgtttagtgctataaaggtttgtgtttgtttttgtagagacaagctcttactcttgcccaagctagaatgcagtggcatggtcacagctaactataacatcaaactcctgggcttaagtgatcctcctgcctcagcatgttgagtagctgggactagaggcacttgccaccacactcaagtaattattttttgtagagacagtgagtgtctcaaagtgttgcccaggctgagtgccaaaaagtatttatagtagaagcagaagtgatatatcattgttaaatatagtgtatatatatayatayacacacwcacacacacacacacacacacasagagaacatttctcatataccttgattcacactgatagtttaccgattaaatataaagatgaattttgttcatctgtagccttcaaatagcaagcttaaagaaatataarattacctcaaaatttaagtctcattgggcagcctcaaccagtaacactcattattagttaaacccagtctgaaggcctgcaaagcaaagccatggtactgtcaaccatgttatataggcctaatgtctgaatccttaccagtgccatttttatttcttagacacgtttcatttatcatactgttgtgctatatttcacatcagatgtcaagataaagtctctgatgtcaaagatttagaagcagtgactttccagatttgctcatcagaatgcagtggtcctggacatacagagcaaatggatgacattagatttctaaagctgctggcattaggtgaactttaggggaaatgtcattcttgagaccatataagagaagtttcaagaatgtaaattaaagctatctgaagtactggacattttascatgatataatggcactaagagattttgcttatattgcgattgaggcagtgrccacaaataaatacaaatccagataatgatcgaagggcaatataacaaatatgttaaaaggttccttattaaagagtaattccctggccacccagggttcttgtcatccatgttcatgtgctgacagaattatgaaagcattttcatgtgaatactgaagagtattatggacattcgtattcataggtacatcaaaaaaagaaaatgtaagagatagactatgcttcgaagaagacaatgattcttacctattttttgtttaaacacatgttatagactttgcttgataataacatctttttttatctcctaatcaycccataagtaagaaaaaatgatctgtacttagaaaatgaattacagagtggttacatagctttcctggggaaatcattcaatttattagcaaatctggattagggcacagagaacctgttcctaattcatttcttagacaatcacaagtgcaaaatatttggtgatatgaaatgagtaacttcatccttaatgcagaattatgtaaattttaagccataaaagttttttttgttttgcattttggatttacatttataataatgatatgagaatattaatgttccttgatcaagttgctttttttcccccaggataaaaattaaaatggacacacacacagagattatacttttcatatatacgtgatgtgacagctacaaaagtaattacagcatagatttatgtattttctgtattcacattaaaagctattcagttgaattttaaaatgctgaaggatgtaatactttttcattttgaacttttaattgcatttagttaaacacaagaaaattctatgaaagtaattatacatttcagtttttctttgttactgaacaaaatgaaatctgtaagtctagaaatatgttatcaataaaacacaaattactaaaattacttaagcagttcagtcacaggacagactttttaaagtttatgtttagaagaaacttcatctaggttatatttttgttgtctcaacatttatttggaaaatatagtagaatgagaagctctctaattggtatagtatttttgtatatatatacaaatatatagtatagtatactactatcctaatagtatagtattatatttttgttgtctcaacatttatttggaaaatatagtagaatgagaagctctccttttaacagttttgatcacaaagtataaagtgtttgctgaaacacaattgattcccattagctgtctcactagtgtctggggcttagggttgttttacgttatcctaggatcctgggagttttccatacctgcagtctatgtttttgttggctgactttctacggaggggcagctatcgtgaattatttcagcatagtctgcttagggtttccttagtattgatgggttttgtttctttctttttttttttkttcctttacctacaacacctagactaccagtcttattgacagggtaataaaggtaaagctcatcaggagagctatttctccattttactatcaggacagataactttttatgaagaagggactgaataagaccaagcatggggtcacagttaaccaaaaatctgtggactgaatctagtctctggttaggagctgctagcccaccatttggttcttccatctccaaaaggctcagtttctctcttcctataatatttaccatgcctcttatagtattctagagactctctgagaatactagacaggatgactgcaatttgaatttttagaactatgtcgtttgttatgtggtgttgtttacctgcctgattcacttcatgtatacagaatcttctgttgcttgggtgcaacttgccacagctctctatatgacttctgtctgtagagctctggactcccactgttccaatggaaaatttttgttaaaaaacaaacaaatcatcttacactggtaagatattttatctgaatgtgtagcagttcatttgttattaaaaaaactgtttaaataaaaaaaaaacccttcttacttgtgagaagttttccctgaatatatagcctttctgaaagctttcacaatattacacattgctccttcccatacagcctcccacaaaatgtagttatttagtgttatttagtcatagcttatagctcattagtagtacaaatttctcgtcctaccacagacctattgtgtaggagtttccatatatagagcctgaaaatctgttttttaaacaaatatctctggtcagtttcatgcacacactattttgaaattcttttgagaaccactgacttaggttaagtatcaacctttttgatcctcaaataggaaaataaaattctaagatgactttttggagtatgcctgggccaggtaagaatttcatactccacaacagatcgtgcagtaagttcagcagagacattgctaaacgatgtcctgcaacttccagtgaaaagagaatggtggcttattgctgacacctcacagagacaaaattctttgagtggcaagtaatcaagatttgtcactgttttcataaagaactgttttatttctctgttgtaatcattttttagttgaagccaaatatttaatgaagtgcttaggaatttcaagcacaagatatgtgcagcctctggggaaatccaacaagtggcattttttgtcacctggatgtagataatacctctttatatctcttctttcaggcaaatccagaaagacttggcctgagaattttatcatctatatcacatctgccatttggtgtagagcctagtaagaactaatgcygcctcaaagaaggccccaaggataggactacaaacatgtaactagtaggaaacagaggaatcttttattaaaatgttagagtgggatttaagcttattttgtgcaatgacagtgatgacccaagatacttcctatcttaagagttcaaaagtatcctttcctggacattagtatcctaaaaaagaaactgaaaagaaaataattcttagtattttagcacacaaaggagactcaggactagtatcatgactacattyccactagctgataggttttgaagtgctatcttattcacttagaattactgagaggtatgaactgaattctttccctctaaaagtcagatgttgaagccttaaccccgcagtgtgactgtttggacgtgggtctttagcaggcaattaactgtaaataagctcatgagagaaggtccctaatctgattggattggtggccttataagtagaggaaagtatagagacgcctacctatctckgtctgctcacaaagaagaggtcatgtgagcayacagtgagaagctggctgtcttctgcccaaggggatccctcaccagacaccaatcccattggcaccttcatcttggactttgaacctcttgaactgtgagaaaataatttctgttgtttaagccatccagtctatggtattttgttagggcaaccaagcagactaagacacgcagtaaaaataaactgaatctgtcatgcacagaaaagcagatctgtcattttatatagacattgatcaggaaaactagggctcttctactggaaaatcttaaatagttaagatgaatttcagagataggttcgtttaaaaacagcaaggcaaccctttgacttcttagaagtgttgtcaaggaaaatacaagattttttccctctgtttcgtttttaggttgacagtaaattatcatgttttcttccttctttttgctttggcaataatttttgtattcataaagagtactgaatcagatgctaaacagttgagagattatcacttaaaagattttcttagattttgcatgtccattgcccttgttctggcaggtagtgaataaaggactgaaacaggctgaaaggatttacactagtactttttcatgatgttttcaaggagggtgaaagaaaatagatgggaaarrtttgcatgtcatttcatactgatttgcataaaactgcatgacaaaattggactgaaagaattcatatagttagtgagagataatcacccatgtttcctctagctgcggacaagctcttggtttattttgcaatcatgtattttaaaatgcaagaagaagggaccaaaaagagtttttgtggatttgacccaaactgagacaaatcatcatttgggtatcatccaacactgtcaaatcttagtttcatttgtcatttacttaatgttataaatggttctttttaaaataagttataattttaaaaatgatcaaaattccaaaatttcatgggattgatggaagcatttttaattttttttagtaaggattatatgccaaagcagagacgccagcactgctttatcagtgaataaaagagaaataattaattttaaccctgtgtattattgtcttcaaaatagctattttctggcatatatgtattactgaacaactttttgcactctgcttatattataatttacttttgatcccaagcccatttaactaaagcagtcattgttagggttaatcaaacacgtttgttagtatcttttgctctcaaggctgataatatcaggttgggtatataagggacttgcataaatttacaaaaacaaattactcactggcaagagaatttaactcagatatagtttgctattactgaattaacagtgggcatcaaccagtggagattaattttaccatctgtgagtcatatgacctaagacattaaaatttggaatctcgtttgaatcttagatgactgatgatgatgatgatgatgatgatgdcggtagattacatttattggcttcctgctgtgtttcaggcattaggccattttacatgtattatcaattsacttctcacattttattattttgatcaaagagcttaacaatttgaagtttagagtaatttgctaaaggtcttactcatgaaacccaggacagagaattgacttcagggaatatgactaaaatcgattttataaagtactgcactacattgtttccttcatgctgtcagtttccaatttgcagattaggaaactgaggcccaaattactgaactgattaagtaacaactacttcattaaattgaatggctattattaacactggaaactgacttctaagtttagtttgctttttgttaccctagctctcttttcaagtaaccttttggtccaccatagccattcttattttcggaacattacgtgtttaaaaggactcctyaaggagtatttaccactagcacaatttaaaaatgttgaaaaaccagaaygtactgactggtgtcatcttcccaagaattcagtaataacttaagtaaaatcaggtttatttcacatactgatatatagtatatttagcttaatttccattttacttttattcattcttgatattgccatataagaggtatagaaacactaatattaaacaaaatatataattttttattttcaagtatgttacttgaaattaagaacatagtatcattcatatatattgttttttcatattatgctatgctatttgtcttctrcataaaattgggctttaagtaagtcatgagtcatggtaatgrattttgttataaccttatttttatgaacctttttttattgaatcactttttattttatgttggttcatatgctctatgaaatattcaayggggccaggtgcggtggctcacgcctgtaatcccagcactttgggaggccaaactggccggatcacttgaggtcaggagtttgagaccagcctggccaacgtggtgaaaccctatctctactaaaaatacaaaaattagccaggcatggtggtgcacacctgtaatcccagctactctcgaggctgaggcaggataatcgtttgaacccaggaggcggaggttgcagtgagccgagatcatgccactgcagtccagcctgggtgaaaagcgtgaaactttgtctcaaaaacaaaagaaaaagaaaagaaatattcaatggattagacaactaaaaaacatttatattaatggtttctcaaaatatttgttcctttggaagaattgatcggtatccattatcaaagcctgcacacatttttttcttgactattcacctgatctgaaaatgcattgcccttagttaaatatatattttagaataaattatcctgagttactgatacgtccctcactcatgagaattagtaaaatatcagagaggaaaataaataaatgaacatcatgctttagctttcagggaattcattagtcaatattccctctttcaaaggattttgaaagtatatgcatctgttagatacaaatttttaagaccagcttaaaatcgcagacctaaggttaattttaggtgaattaagtcattgctgcaggggccccataaatgaaagctaactatctaaggtcaatccttaagacttttgcaatacttactcattggtattcttgtgcttactcttatagcttttggtgtgtgccagtaatctctttgttgcacattagtagacaaaatgtattcttgtaatttgtgtagctgtaatttgtgtaatttgtaagctgcttgagaatataggtattttttcctataactgctggatttctgttgcctgaattggtgcctgatacatactaattgatcaattaaaaatttgcaaacaaattcaagctaagtaaatcctgaaggctcgtagggtatctggttttgatgtgattttgaagacacacacaaaaaaagaagtacaaaagtcaaatgttmgtataccttcctgaatattatattttaaaactatcagttcagcacactaagttcacttgtgaaaaggaaatgaatttctgaatgctgtttgtttagaagatagaaacagcttctcggccttttggctaagatcaagtgaacaagatacaaagtttgttgaagtggaaactatgaaatgatttgtttgattacatttgatcacttacactattgtatatcatactatcttacttgatttttagtaaagtatcttgaggaatatcctcttaatcctattttaaaaataattgaggttaagtagtttgttcataataacacagttagtagrtggcaaattcaggactgtctctaaagcctttcctctctcctgccttatgtatacaagaaataagctacaagtgttatagatcagtttcatgaaataagtctctaaggacaaagtgtgatttattttaacctggctgcatttttaaattgaaaagaaatacataggtttcttgttattgtgactggaaayacaaaatgcattacatgatatgatgtttttctcacacatctgagaaagcattgaagggttctgagcaaagtaatgataggatagttttgacagtattcatctgaatgacagatcaactctagggtagagtcagggagaataaaggaggctattgcaatcatctaggcaagagatgatgagtggctggatcagacaaatctttgggccttatattttagcctcctttsctagttcttcctggtagcggtgaaaagtggttgaatttggaatggattttgaaagtagagccaacagtattttctgartgattggatgtgtggagagggagggagggagggagggaggagagaaggagggaataaaggcaaggaaaagagtgaaagaaaagtaaggacagagacacaaaggtgattccaggatttttgcctaaacaactggaaaaattaagttactctcctgagttaggggagaatgggacagaagcaggtgctgggatagaaagggatatcaggagtttcgttttagctgttatcagacttccagtatatcagattagatactaatgtgagaatcaatatagacataattaaagccatgaaactggatgacaacacctgggaaggctgagtagagagaagaggcctaagcctgttgagctctgagatactccagagtctagaaagaaggaaaggaacagccttctccttccggaggaggaggagccaatgaggtagactcatcctcaagattggggtcctggaagtcaagtgaagaaaatattaaagagaatgagtggtcagatgaagcagatttttcaggtagattaaggccaggaacattgagatatgaccataggatttggtaatgggggagtccattgatgaccttgacaaaagattgatcagagaagatactgttactgaaaataaacagaagagattataaatcactcacctagaagacgtctgaagttattctctaaatttgtgatcttcagagaggcaaactattttgcagttgttacgtaaatttggccatattatcctgtactgttaaactcagatatgttagtcagtgatgtaaatattgatgttaattactttaactgtcaacatttaattaaagtttttacaaagttttacttgacgttcctcctgtgttttggtaagttgttactatgtggtggaaagggcatacatacctatacaaacagtcctaggtttcagtccaaacttcatcagttactagttgtgcaatcttgaacaagktaggtaaatttttctaagtctcagtttcctcatttggaagatgacaggtaataactactttatgtgattgtcaatcaacagtggactggattaaaaaaatgtggtacatatacaccatggaatagtacacagccatagaaaatgaaatgatgtcctttgtagcaacatgaatgcagcaagagggcattatcctaagcaaattaatgcagtaacagaaaaccaagtaccacatcttaacttgtaagtagtagctaaacattgagtacacatggacagagaggggaacagtagaccctggggcttacttgaggttggagggtgggaggaaagtgaggattgaaaaactacctatcaggtactttactcactacctgggagacaaaatcatttgtacatcaaattccggcgacatgcaatttcccatgtaacaaatctgcacatgtaccccctgaaaaagtttgaagacgagaaaaaaaaaagataccttcagaaaactatctgaagcatgtgatacaattatacatcataaatgatgtaaaagttgaggcattgatttatactccaaggtgttattttttttctccagtttttttatataaatagaaaataggacatttatttaaaacaactgcacagtcactgatattcgtaagagagaytatcagcagaaataatcatgggaatcaatttagaagccaaataatctagatggagatttgtgttggattttctataatcaactgttatcaactatatactactcagtagggtgaaaacaattttaataattttgttttgaaaaaatttaaatgctataatgaattatgtgcatttataaagctgactccgtattttaaaaactttgataatgtggaaaggagtgattagacatttggtcatttctaacttattttaaaggatgaaaaatcataaaaatgttttgctatattttgtacttttgcaatacctctacaggaatcatattttatgtgtgtatgtttgtgataaatcctttaacaagttatattaagtttgcttttgwtacttagttgccacctagagtttacaatastrtcatcaaccaacattgtcatctatttgcatttaactaataatcatttaaaataattggaacttagtagaaagtaataaaaaattagtaaaaatcgaattagatttttccattgtttatcttcatgacttaaaactacaaaataattatgaggctttctcagactgtaatttctgtttgtcttcttttatagagctacattcatgggagcagccaggctcagtttgtggcagaatcacacattattctggtactgagtatccttttaagataccgacgaattgaaaagggcaaactaaagctacatgtttttaaattgacatttttcctggcagtaaatatcaagacttttaagagacattaaattttaggctgtactatatgactaatttttattttttatgctaattatttcctattacggtataatttgttgctattccgtatcattaacagatcataatttttttttactgagtgttgaatttcagagtattacttttactctacattgatgatctctggctagattttttcaagtgtatatrgcttttccgtatagcatcctaatggcaagaaaaaagtgccttatgatataaatagcagcttaaaaaaggtattttcgtactgctccccttaaatatatggtatgtcagaagaaggagatttagagtggttcaacatgcctttttggaacatatcagagtgagtcagactaagtgttgtgaatcagatcatacaatgtaatttatgatttggagttagaaggatgaagaatgtaacaggataaaaaatagtagcagggtaagaaaaaggtaaggttaagcatctaatgtgaatattcttagaatgaaataaaattagtttggacactgttttgggggaacattgattctcattatgagaatgtaacgtgtgcctctagtatcctttataaaatttgattactaatatcctggttactaagattcatattcaaatgtgtagtctagaccaaattgtccagtactgtatataaccaaaggtgtaaatctttaactatctttgaattcatctaggccaaacctcattttatatgtaggaamactagagcccacaaagggcttatgttagggaagcccacttgagctagaattagaattcagttgtctttttcatggtctatcctgtgttcaagtacttcagttttatgtacaatactttattatggtgtgtgacatatcatttcaccaatgaatgttagtcatgcctattatttttaatctggaggaaaaatactatctttttaacaacattgaagtttttggattttattactttgttgtgtcataacaatgcatttttaaaaatctactggcaaagacttatttgaccccttcagtttattcaagcaacctattttatttgcttactgtgttttaggcactgcatcaagtggtggtatatagtgattacggtatggtggggaaaagggatggaaaatgtttgaagcacttggaattctcaagaaactcaaagacttcctcgtttgtaaaatcaggattagcaatactgaccacacgggatttctgtgtgaagaaatgagatagcacacattaagcatccaataatcacaaaaggctagttggtgtattcctctgttttcccttctttcttactctgaactttggtggccacagataataagcataaatacgtatatatgggttgattccttagtgatatggtttggctctgtgtcccyacctaaatctcaccttgaattgtaataatccccacttgtcatgggagggatccagtgggaggtaattgaattttgggggtgggtttttcccatgatgttctcatgataatgagtaagtctcatgagatctgatggtattataaaggggcattcccctgcacatgctgtctctttcctgcttccatctaagatgtgcctttcaccaygattgtgaggcttccacagccatatggaactgtgagtccgttaaacctttgtttctttataaattacccaagctcatgtrtatctttattagcagcgtgagaacaaatacacctagcttttgacaaaggtgtagatgaccaggaaaaaaaaaatcatcttctaataaaatttatcaaaattctaaaacttgaaatgtaaacattgaaatgacttaatttttctagagcaacatttttgaacccgttaaattgtataacttataaggtaatacaaaggcattgtttttcaagctttaatgaaaacgaaggaatgaagttgagaagaacaagattacaaatcgcgtttatattgcaggagaacgaaaagatacctttctgaaactcattgaacaccactgaccatcttcttcctgtgtctgtctccattctcaacatttttatttctcccacccttgatgatgcatgcttggatacatacgtgaaattgggcacatctgcagcccatttcttgcttacatttayttacttgcctgtatgctttatggtttcaaaattaagaaactactgtgaggagtacttgtttggctctagtttgtctcatagactggaaytggaaatacaaattttgttgtatttttcaacaaatgctcagtttctgcacacctgctttaatatggtaagagattaatgctttctgcacatcagaggtgccttcggtgagaaaaggaagtctttgtgtatatgtttatagacatatctactcctctctattaaaaaataagggcaaagctgtatttactctcgacttactatttaaagatattcaggaagcaaaacatgttaacattaaagcaaatggatagaaacataaagcatttgttgcaggtaagtttttaactcatttatttaaatattatagcttctttttgtttttktttttttcctaacttgtttcaatccatgatgtagcatcttagcagtatactttatctggataaagtgatgactatcgaaacacatcaggaataccgagctgaaggatgaaaagctgtgttgagatcatccttttattgtatggcaggaattctccaaggtttaatttcatggatcattgacatcaagctgagatttaggattcaaataaatttcacaagcagtgtgaatgttttcatatagatcttagcagtgatacataaaagaattaaaagtctgtattctctttatgctaatagtcattatttgttgcttcatttttcctgtgttttttattttagacatatctattactaagaaagagaaaaattcttttaaaatggtggactcattatcagtgaaactttaaaagaagtccaggcacagtggttcatgcctgcartcccagcactttcacaggctgatcattttagttgaggagtttsagaccagcctgggcaacagtagggggaatcctgtctctacaaaaaattacaaaattagccagatgtgatggcatacacctgtggttctagctacttgggaggcggaggcaggaggatcacttgagcccgggaggtcaaggctgcagtgagctgtgctcacacactacacttgaatctgggcgatwgagtgagaccccgtctccaaaaaagaagttatttttcaataatttctgattctagtttcatttgacagtctactgctactttttgaacaatccatattttctttgtaatttgtgtattttgttttcttctggcaaaaaattacaaataccagatgattacttttcatttatctgtagagagaacatttctatcttttggatttcttgtcccaatttagtaagtcagattatcagatgcagttgctatatacaaagttttgctgaaaaaatcataagagaaaacagatggagcattttgtatcataggttatagatttatatttactaagaataaaaatatctccatatcagtagtgttttattttttcagtatcttatttaagaaaacaatcctaagtagtctttgagagaaaactatatgaaaaaataagaaacattatattttaatatggaatataaaccatctaaaaataacttacatagggctttatatttttgcaagtaaaaattcatttttatttcatttatttttccttttgttaatgctttcaccatctaatgcaaatgtgaatgagatacttgctgtttacagaaaggtaggatgacagaaaaatacttataatacagtgagacaaatgtatgcraaggcaaaggaagtagcaagagaggaactaactccctgtctagagaattggcactgacttttcagctggatattgaagtataaaaagtttcagagacagagaaatgggtaaggaggctatattggtagaagatacaacaggtacacaatcaaaatgacagcaaatattctttattgcaggaagataaattcatcaaggctggaatacaaattttgaggagattggtgaaagttaggttaggctggataatgaagaccttgctgagaaatttgaatcttagctacacgtagtagatgcagtgcaattaatatgccaattttatatatttggcattgggtaacttacgaattctttttgaagtattatgaggttgagccccgcatgtcttcttgataaatttggctgtggaaagggaaatagtagcgtcatgcctgtttagggaacagaaagccaatggaggcttgctcctgtaataatattaaggatagggtagagaaggtagagcaaaggaagcaggagtcgctggcagtcgttctggctgctggcaatggttcatcctccagcatgaacctaagtaagggaatggagagtgactcagctgctgttttagaggaagaagaaacaaaattgataataaatgtcacaagtaaggttcaagaacaggaatcagagatgattctgaagttcagctatgtgttgtaggatagaaatatggaggagaacaaggtttggagggcaatgtttagcccaaaaaagttcctaagattgattaggcctcataattggttgatgagaaagggattaatttgtttaaattgcttaagatcataaagccaatcagttgaagagtcaagaacttaaaacttttaacccattgtttttctacttagtaatattttgccaataaatcaaaacctctgtggtgaataggccagtaatgttctcaccaaattatatattgtgtttatttgttgtaaatatctgaaaagatcatcataataaagatacagtggatatgttgatttattttttatttttattttttgagacggagtctcacttcttggtcgcccaggctggagtgcagtggcgtgatctccgctcactgcaagctctgccttccgggttcacgccattctcctgcctcagcctcccaagtagctgggactacaggtgcacgctgccacacccggctaatgggtttttttgttttttgtttttttgtttttttttttgtatttttagtagagacggggtttcactgtgttagccaggatggtctcgatctcctgacctcgtgatccgcccaccttggcctcccaaagtgctgggattacaggcatgagccaccacgcccggcgatatttctttagttattctatcgtatttttgtacagaagacaatatcctctagcagtataaaaacaaatgtgtgtggggatatgtaaacataaatacacacatacaygcaggtgcatgtgctwtgtgctgagatacaagagtcacaaaacctgacaagatgtctgatggtgtggcatttacagwctaaaggaagaggaagacacacaacaaatgacagtgcaaataattcttcatttacaattatgttcttaaaaagttttcaaatgtccaaaattcagtagactcaggcttgaggcacatggatcttaagtggaatatcatgaagtgaaaatatgcagtttttgaaaccataattggaagaattagtatgcatatgaaatatataaaattgtgtttaaaactctttatataatttcccagagtagagaatttgaactgtggtatcaaatgataaaattaaggtagggtatgtttttgattatagaatgttcttaaaattcaaaacctcakgtatgattttaatgagataatcttaaatctgcttttcttactaaatacacttataaatatggcacaataaaacagacatgtaattacaagtagtggttttctaaaataaaaaggcaycttcatttcacatttagagaaatgtttgcagatatgtatgattttactgtcctaactaatctgcctttttttctatcaatcagtagtcagtccaggaggggcagaactatgtcatttaaaattttatttaaaatttcaaccagatcarattagtttccgtagacagtaatgttcccactgaattcaccaagatatggtctctctgtatgagtggatatagaacacgtgagttctaggataagctttagtgtcaactatataatctctgacctaagttagaagatctcaagaaaatgacatgaaataaatattagttagaagtaaaattatttatataaaagtaaaggttatactagcaatttaaaatttttattcttataaagataacattgcattttctgtgagcaaaacattttttccatttattatgaaagaatatgattttattcgcatctgtttctagtcyattatagagagcaaacattccttttaatgtgttatatccaaggagaaacatactatagaaaaaaattaatgatagatgcagttgaaaattttagatttagaattctttaagtaagtcttctataatgtgctaacatttttttcaacgtctatttacatttatctatctttaaattgaaaacatcttgattccattcctagtagcaacagtaaacttagcatatgcaattgagaagggattataatgttttgtaaatatattcgttactaattctgtagaatgctcagtgcctctgggtattgtatgtaatttacacaaatagcagcttttttatgtgggatcatgkcagtattttgactaagcagtaggaaaatgatcaacaggatcagcaaagaaactggagtgtgcacagtagtttaaatatatattgccatgatattaatcaataaaaatgtgcaaagtaatacaaaaactaggccaaagtatgtgtgtataggataaagggtagaggtccatctgttattttcttttaatgctgggatattccaataaggcaaagctagacggctacacccatcaatttaatgaccaaaaaagaacgtaacattctttttggtcagacgtagaatcttttcagatttggagggtctttcattaatcattcagccttccactcagtgaaagaaatgccacgtaagaacagtgagagatgatcatctagcttcttcctgcatataaaaattaagatttttatgttacaaatgtaattttccccaaatggtaagtattattcagtctctttttcagccaaaaatgtttcagttaatacaatgaaatttaagctaaacgattctcaactcaactcctaaaggccttgagttaaamaatgtatctttaaataatagggagggttagcgagcttaaagccattttagtataattcatatgtcttaattacacccatcaggtttttaaacggctcactgctcttttcttgttaaagcttagaaaactcacttttgcaagaaacattctgagaaagagatcatacttacttactgaccccgctgatttctaacaaaacattttatcttgaggttgtatataacctatgtctagtaatccctttgctttaaaattcccactttaagrttgtgtgcacaaatgtttactaaattcttgcattttaaaaaattgtcaagtaagaataaagctaaattccagtgagacataatggtatacagtttttttgacatcaccttaaaatctttacagcagggtttggcaaactaggaccagttcaggcccaatccaacctgcctgctatttttgtaaataaagttttattggaacacagaaacacccattcatttacgtattgcctgtgactacttttgcactacaacaagttgagtaatagcaacagactccatatgacttgcatagctggaaaataygtgtgactctttcctgaaaaagtatggcaatttctgctctataggctgtggtcaataaagaacacaaaaatccacacttttattaactcacccgtgaacagttactgtttttatctttcattccctgcaatcatttctttgcatttgttttaaaggagtcaggttttatatatacttttatacatattatacaaacatatacatcttttcacttggtatggtgacaaaattactattaatatatcttkcttttttttttttttytttttttttttttttttgagagggagtctcactctgttgcccaggctggagtgcagtggtgcaatctcggctcactgcaacctctgcctcccaggttcaagcaactcctctgcctcagcctcctgagcagctggcaccacaggcacgcgccaccatgcctggctaatttttgtattcttaatagagacgggatttcaccatattggccaggctggtcttgaactcctgaccttgtgatccgcctgcctcagcttcccaaaatgctgggattacaggcgtgagccactgcgcctggcctcttgctttgttattaaraatttttgtcaatttcattttatatggctagttaayctgtcacaaaaatatctcatatgttatagttggacatttacattttaatttttcactatataaattattctaaaatagatttttgtatgtatattaagttttttcagtattttatgttttgccttatttatttgggaatagctttataggagtgtagttcatgagcatacttctggcacatataattaatgataattgatgatttgctgaggtttttgacatgctgaaatcttaaaattttcatgttgacttggggtttctgttccatttctgccctgttaatagggagtctgcatatttttttaactcatataatttgaaaaatgctatattgttactgcattwgctcccaacaaaaatagtaaattataaaaatgatttaaagcagcgtgaaacataagtgatataaaggtaaattcatagacatctttaaaatggcaattttgtgagttattgcaaacttatttgtaaaatctggaatatgtttatggagtagtaaaatgtatttraatgctctgtgctttatgaagaagatttttattcttagcctaaagatatttcatgctgaaactgggctagcaattatgttctttgcccaatgcttgttatcattttcatctaatcctgatatcatcttacttcattacttttgtgcttttttgctttgcatctttcactctttagttttgtgactttgagcaagttgtttaaacttctctgggctkcagtttccttgtttgkaaacagatrgtaatgtctacatcagagagttattggtactgggtaagatagtgaataaaacaaagttcttgcccttttggagctaaaattgtagtgctggaacaaagacaataagtacattgtaaaacgtatacaatctgaaatttctttcaaaaacaattttataataaaaaaaaatcagagtaaaggtgagaggaggcttctctgacaagattgaatttgaacagagacccagtggaagtgagggagtaaattacatggccatcccagggaaaagtacctcaggcagtgggaataacaagttcaaagatctccttattacctgacttgctttgaaggtattaggagaaaaggctagaaacctagaaggaggatttaatttctaaagcaggaaacaaccaccaaaactcataaaggaaaagatgcataaatttggccacaktaaaattaaagttttctacatgacakaataatttaaaatacaaatataaaggagaatctgaaygcaatacttcagtcaattcgtatctggaaaaaaaaatgttgtcctccaagttaagaaaaagcaactgtgcttttggaaaaacgggaggaaaaaaaaaraacaagcagtgtgccaaagattaaacccaaaaaagaggaatgaacatatcaaaagatgctcagaaccaagtggtgagctattcgtacaactcttttccttatcagtttgataaaatcaataattgggtagtattgtgttagtgaaatgtaagaaaacttgaactaacattgctcattttagagagcagtatgattgtacgtagcgaatttgaaaatacacttaccaaacctctcaaaaattccacttatggttatagaccgtggagaaaatattgcacatgtacactaggagacctgtgaaaatatattctttgcaggaatgtttatagtagcaagcatttggaaacaaatgccatcagtaagataaagcaataaaatatggtatactcttacgaaaatgtacgtaattttctgttaccacattgtttgaatttaagcaattcaratgagaaacatgttactcatagttttcaacattgtaacaatacagagggagagtagtaaaaatgatatgaagatacatttatagggatatgttatacttgggtgaccataattaatgccctgtaaaatatacttttccctgagttcatggctttgtgtgtgtataaaccgataacatatgtttgtgtacatgtgcatttatatgtgtataaaatttgmccctaaraacatactaatatattgctttactcccattaaaactgtcatacattttattttgtaggctttattttccccagtaatagaaatactgccatttcccccatgattcattaatcgaattgaggaagctgcttattagatgaatcataaaatgaatgtatgttttacttttaatgtctacataaattcatcttaaatgccatttatgttttgaatatttaaaaatgtcatagtagctgggcgcggtggctcacaactgtaatcccagcactttgggagaccgaggcaggcagaccacttgaggccagcatggcgaaaccccaactctactaaaatactaaagttrtccgggcatggcggtgcactcctgtgatcttccagccactcgagacactgaggcatgagaaccgcttgaacctgggaggcagaggttgcagtgaatcaagatcgtgccactgcactgcagcctgggctacaaagtgaaactgtgtctctaaaaattaaaaaaaaaaaattaaaaagtcatagtaaaataatctgcaattctatttgaattattagtttaaatatgtgtatttaaatgtgtagataaaaatttatacatgcatataaaagatattgcagaaaaaatgattaaaggggaaacttagtaactccttgttaaggatccatatcagtcacatctatctgctctagaaaactgagttttaagcagtagaaatctcctacatatgaacagttttagtgaaacaagtttttaatttttatcatgttgttattaacaatgtccyatgtctgtggattcggggtaatgtatacaagtagatggtccaaaacactttaagaataatggatttaatttaaagtctacagactaccatactgrtgatacaaaacagtcattctcttagaatattcttttcaggctactgcctacatgattgaaaggcaggaatttcatagaaatttcagtgtttttcaagctgtgtagcatggatctctaaaagtttagwgctagtctatggtatgtgtatggtgggagggttgatgttgtgcaggggtggmaggggcttttctcttgtatatgttaggctcccaaacataggtttttctttattttccttttttctagaaagggttccaaagctaaaacaaatacaatagttygaaaaaccgtttgtatagagaggtcatggaagcataaatgccttactagagaagtcaggcatttatccttatccagaagttggataatatggtcatgaagacagattcaaatatgaacattataatttattactaattagaatttcaataatatggttataaaaacaagactcagagaggaaatgttctgtgcagaattttctctgacctcctccacttgctggtatattgcccaatactgtcctttgagcttttgttgatagagacatcctgcacaggagattcattgatgctgtttatacacaaatagcagtagaaagaaacacaagggaatcataatgaaattaagcaaattgaggaggttctgggctagaattgcttcatttttctcttcaatttttagtccattaatcgcttgggcgaaatacatattttcagaattgatgagttctaaaatcttaagagtcgacaatgtgaaaaatgttgtaatgacatggcaaagaatgtttttatgaagatgaaaatttcccattttcttaattctggcattattcaacatagcatgaatatatccatcctgttgcaagcaggtgttaaaaacaagtaattttgtgatctcattcttaaggtatcagttagctgactagctcagggtcctgctagattcattaaattgttttattataatatgcttgtctgcttttgtaagattgttaattgtataaccccagattttcaagtgacatgataccggaccttcataaagatttcarctaaacaaaatctatgaaaaaatgcttttagaagaaaaagctgtgtacacacacgttatgaaaatgaaatgtgtcaatgacatgtgtcatgtctataagcagtgcatatctttatgtataatgtgaaatgtggtaactggttttgagagtccatrtagtttatatgtgctrtgaaaatcctggaatttaagaacctttggaattagcctctcaatatatcrcaaattgaagtttcaggttataaatttttaaagttaaggcatatttgctcacaaagaatggtaattttatgttatataaaggtaattgattgtatttacctctgtgtgcatttgtagtttaaccattctggaacattgtgttcagagccagaaaaattaatagattttattcacatctatgtctacggcttccttgacaactactgcagatgccgctatcaccatggggatggttcttctaaatgaagcagcaacttcraaaggcgatgttggaaaaagacggagtaagtctctgtgttgccatttttgtaatttcgttttagtsttmagattcatttaagtcaaatgggaaatacataaaagccctttgtaaacaaacttctaaagaaatgttctggtttgaagaagattttaacttttttctattgctgggatgtgttcatwtacttgaaaatatatttcttccaaaggggactgggtcgttttctgttgatttgcttataaagtggagctgtccttcacccttgtcagggtgctctaatccatccctgctgaagccatagtcttggttgtaattccacccggcacagagagatggaaaattttgagggcagagtcttcagagattttattggcatgtaacatattccctctgctacaagaatcaggggtgcgctcaaagcgtgacttagatgaagcttctgcataggtattgtacagtgagatactcttatkacctttctattcgttccaaagcttcctttaacattttttaaaaggcatctattgatactatcttttccagggtctttgccttttccattgatataccaagatttacaactccctcaagttctccggcattatgtttttaagcaagttaattctgtggcttttctttgatgggaccatttctctcagagttgtagaaaaacatatatgaggtttttgagaagtaaagagttttctagcaaaaagagaagaacacacagggaaaatgtgctctgaggagcaaaggacartcgattgtttcctgccacagacctttttatagttaatatcaagtccctatatgatttgatatgtccacagacctgttatttttttctttctttgcatttctgaactctctttaaaacccaaaatttatgtatgagcagtataggtatctgaaaaagagtatttattaagatatttaaaataaaaatccagacttcatgggtttttagctagggtgacatgtgtgtaaasaaatcatagtgctttctaaatacttaaaagtcttaggggtagaaatgtttttgatgtaatacacagtttagactgccctcttttcctatggtatcatctattgtattaaagaaactacaaaagraaggagcagattactttatcatgttgaattttatttatttatcttttgaataaacaccatgtccttaggattgacaaattatgcctatgaggacatactatttttttaataatttattttagatttgggggtttatgtataagtttgtcccatgggtattttggatgatactgaggtttaggtaaggatctcatcacccaataatgagcttagtaccaaacaggtgatttttcaacctacacgctcctcactccatccccactctagtcgtgtctgttctcatctttatgttcatatgtacacaatgtttagctcccacttacaagtgagaacatgaggtatttggttttctgtttctgtgttaattcasttaggataatggcctccagctgaattcctattgatgtaaaggagatgattttgttctttttggctgcatagtattccatggtgcatacataccacattttctttatctagtccgtcattgatgtggtatatatgtaccatggaatcaacctgggttgatttcatttttttgctgatgtgcatagggctgtagtaaacataagagtgcatgggtctttttggtggagtgatttatttttctttgggtgtatacccagtaagggggttgctgggccaaaggtagcactgtgttaagttttttgagaaatctcgaaactgttttccacagtagctgctctaatttacattcccgacaacagtgcataagcattcccttttccccacgacctcaccggtatgtgctttttgactctaatcatagccattctgackgragtgagatggtatctcattgtggttttgatttgcatttctctgctgagtaatgataatgaacattttttcatatgtttactggccacttgtctgtcttttaagaaatacctgttcatatcctttttctactttttaatggggttgttttttgcttgtggatttaagttccgtgtagattctggatactagatgtttgtcagatgcatagctagcaaaaattttctcccattctgtaggttgtctgtttactctgtcttgttgttttgcggtgcagaggctcattaatcagtcccacttgccagtttttatttgcaattgcctttggagacttagtaaaaaaaattctttgccaaggccaatgttgagacaggcatttcctaggttttcttctaggatttttaaagttttaggtgttacatttacttttcatctatatggtgaagggtaggggccaagtttcattcttgtgcatatggctagccagttatcccagcaacatttattggatagagagtcctctccccattgcttgtttttgtcaactttgttgaagatcagatggttgagagtgtgcagctttatttctgcgatttctattctgttccattggtctgtgtggaggagatactgttaattatgtgtttattgtatatcctgtcttaaggtaaataagaaatttgtagtaaatttttaaatcttacaatatttattgtagcaatatgatactcaatttattaaatcaccgttttcaactcctctcttggtagatgtttgtttctctaactccagctcccagccacccccaaattaattattcmtgttgtgtatgtgcttgtgtgtgtatgaaagtgagctggaaaacatattttaaaactttcaaattattcctttttgatgtgatttttatttttgatgtggcacaactactatgattaatatttcccaggtcagaatgcatctgcctcattatggcattttattttcacaggtgtagtatctcatgtggctgccgtggttcctttaataattattaacccctccctgcactgagttcctctgccttcccatatacaagtacttgagtagcattattttgttccactgcataggatcaagtaattatcttctgtcttacttgatcacacatttcaagcctcatttctgatagagcacaacccaatggggctactaaaaaggagcaaagggaatgaaaagagtgctttattcttctgaaaaataaaaaaggagatggaaggaaaagaaaagaaagacgtgttagataaaatgacagatttgggaagtatagagtaaataattttgtaattaattataggtttttataaacaaagttgttactatgctgtatctgggtcctggtatgtgtcatacagggatattctataattttcaaaaatgttttttttattttatgatactcacaractcattttttgctttattttctcccaatattcatttgaagttcagctgcatgagtgttgtctgaaatgaaatgtcagaggctacasttggatgctattaaatgtttgtgttgtttcacaattcatattcaaaacttagaagatattcctgtagagttgcataaaaattgacacatttgcagaccatattttgacaaagccgtaccttatgtactccrtgattgccagaattgcagttaaacttggtttggtttatatattggaaaaaattttaaaaatcatagttccttattatagaatcatatagatctgtttgattttccttattttcttctgctttaatctttctctattttacaaataacttcaaatatttttcaaattgtttagaattctctgaagtgaataaaaggtgtattgtgcaaattatgtgttcttaaaagatgtttagatatttcttaagagattaacactaatttctacttatatatttaaataaattttatttaaatatctttgtcttttattctaaacgtactttaattggctcagattaagtatttaaattttataagcatgtttagattgtactaactgcagtgaatcttgtttaaatatccaaaatactatatgcaaaagmaacatattttattatgcatctgctttagagtaaaatcttctcaatcatactaaaaaggaaatgagaaaataaagtactgctcgtattttcagctttcctgggacagaggaatattgaaaacctagaccgcagcacattcgactataacatatgtcctcagtttctttgtaagacaaacagtaacaatattttgacactactacctgccatggagggagttttctcccctctggttttcacttagaccatattttctctctccaagcttttattccttgctttctataacatgctcttactgaggcaatactaaccaaaaacctaaaattattgcatagcatcggaaaagatcaaaattatattaagcattctaacaatgcaaatgttcctgctaatatagccaatgcttcataacgcaagaggcaataatcttgtttgtggtttataacatgttttgttttgatcactctggggcatgttagtacttgtaagaactctataaaagaagaaaacctccagaagacttagatcagtcaattttgttgttttcataccacaaatagtacattttcattgagaagacacaaatagtacattttcattgagaagaatgtggaaaataatgaacacattggatacctgtatccaaatacctgtttgttgtacctgtatgtaccatgaactgttaaatgtaagtatactgtaattgaatgcatttaaaaatataaacaattggggtttcatttgcatatttttagacactaatggtattttctgtctgtttctagtaatttgcctagtgggattgggcctggtggtcttcttcttcagttttctactttcaatatttcgttccaagtaccacggctatccttataggtaatatctttatactaacatgaatgtttttatttttaastaatagaacagagtttcagtggttaatatataattaaggatgaatgtaaagttgctgtgtggtttttttaaattcagttaagcaagtttttgagcacctgccatgtgttcagcatagtgaagtacacaaaggagatataaggcatggttcttgttccctgacagcatgtagtttctttctagacatacatatttttatataacaaatgaggtttaagctcattttgaggacttgaaaatttttatcttcccttagtttgtcgtgatttcgacttcatttgcaagattgttttctcatataattcactgttcattgtctaataaactttgtattatcttttgaattctacaaaattttaacttttcaaaataagagccaacatgaaagggaaaagttaagtaataaaataatttctggtcattataaatcatcataacgagtatctcataagattttcaccaacaaatatattgaaaattcaaaggccgcattattattaccaaactatagtttcagtaaagcacactacagaagaggtgccckattacagttgttcagcttatgaattaggcatatattcattyttgagctttttcctccttcaagttttcttaaataacttacattttttctttctctaaggagtccttcttttaggttagctcatttctaatgagtaaaagctcagtatttcctttttcagagattttgaagactctggttaggtagtagaaccagtgatatgttgatagaaaataaaagctcctcaaagcctacatttcttccacctgtgarcagtggacatttttagaacgtttccacacagatcatagcagcaatatatagctttatcagggaaaaaactaatcccataaaagggagatctgactttgggattataatacaagaataagacccttcagccccaccccctctattttcatatgtggccagaggtacatttccaattctcttcttcccacacccattaaaaataaatataccaagggaatggaagaaatgtgggtatcagattttctgacaccctgcctgcagtgtaaatttttaaaaayatctgttctgagggcagcaagggttatgagagaggcaagcagagtcttcaggtttttcattttactcttgactttagagagccagccaattttggttttgatgatgtgaaataatcaaatccaagattaagtaatayccaagaaagatgaagttttttttttttttcttttgccctgctctaggattgagaatcatgtttttgtatgattggtacttagtttgrcctgtgttctataatggaaactgtaaattaagaaaaatagaaatcctctgtattttatctaggatgccaaaaacacttgaaaattaatccattttcatctatagcacttatagtttcaaaggaaatgttgtatctctttttatgaaaagataaactatacagtaagtgatactgtgagattttttttttttttgaaacggagtcttgctctgttgcccaggctggagtgcagtggcttgatctcggctcactgcaagctccgcctcccaggttcactccattctcctgcctcagcctcccgagtagctgggactacgggtgcccgccaccatgcctggctaattttttgtatttttagtagacgcagagtttcactgtgttagccaggatggtctcratctcctgacctcatggtccacccacctcggcctcccaaagtgctgggattacaggcgtgagccaccacgcccagctgagattcttaagccctatttagttgacaggaagtagggaagggtaaagggcaaattctaactttccttstatatcagagcatgtaatgatactaaaatatcattccctatctagattattatctgacagcaatataatgactaggaaaagtggagaaaaaaatattttactagttttttataatgttgcacttgacagccctatttttgttacgataggaagagtttaagtttgtacttcttttagtttgtactttttttttcaagtagtrgttgtcatttagtataataactctctactgctctggggttatgttgttgttgtttttaacrgaggytggacatagaaactacccagaaagctttggaaaatacatatccttggcctcaccatagatataaatagtaagcacatctgaaccagcatacatgccacttacgttatttctgtgtgaatgtggcatttgaacagtcttcttatgtaaccagccccacactcctgtcagctccccaccagcctaacaggagatagatttgccttcagcaggcctcataatgctagaaatatagatgaaactcttgtaagaagtcagagatggaaattattttttagagtggtttgtgaatatgaaatttgacatagtttagatgaaaaccctaaggaggagctgccaagaaacagaatcaraagasagcctatcaragaagcttgggacaccasgtgtgctaaacagtgtgacctgctgtgtagagaaatggcaggcaggcctctggctgctataacagctcttcacagtgctccatcatctcctgtgctattgtgtgggtttacgagattgacttaggcaagctaaatagagtttgggttgctctgttaggcaactttagattcaastagccaaaaggcaatcagggtattttaggtaatgggaggtttattggagagagatatggagaagcaaggaagacaattaaaraaaaacctaaytgccacatagctaggtgtctcagatgttggaaaaagttcagaaartaggtcattcaacaacagaaatccattgcttcagaggtaactcaaatggctaatctcttgctccaatccttccactrttattactgagtaatgtctttatactgttctcttcagctgattagagccttctatgtccctttggctcccacctatatatactaccggttctcactctctcaacatgattttgtgaattttctaggaggaagtgattggctaagtttttcatcccccagtataggggcgtctgatttaagtagaactttgaagccagtctaccctttggactccttggaggtgttcaaagagctcactgaatgtaaattaattgtctgtttcttaggcacatccaaaagaagccaaatacaatkacaagtacctataaaagttaacaccaccaaatatgtgaccagagtagtatttaattcagttcatgtatttgggaaaaaggtgtgcaggatagatctttgatcctaagagatcgttctcaaaactctgtggcttcttattcctacaccatgcacagctgagtcagaatctccaagtgtgggttttaagaatcaggtgaatagttacccaggtaaatctgatataaccattttatgagcctgtcttagggaactaagtgataaaggatttcacaattgcctctcagttttaaatttgagttgttaaatgctttatagacatgccgtggtgcttactgtgaaatcttctgtttggagaaaatacatacatccrtgaaccggggaataacaatataaagtgtcacaagctaagtggmtggcagatctgttgtatggaaataatttacaggtgagaaagatcactgtgggtctgagaaaggaagactccagaagaaggcttgaattaggctaaaattcaacacagcatttagacaaaggagagaggaggggctgaggrtatttcatgagccgaaagtcataatttgtgtacaaaggaatgggaagagaaatatgttcatggtatattctgaggattatgagtatactgctatggtgtgacagccttaatatgtactactcaatagtgaacgtttctggtttaaaatacattaattagacagaaagaaatatatgaaaaggaagatatatacacaaaaggaaatattcttaaccaatttgggtgaattttatgacagttctctaattcaaattctagatgtttgcaaaactaataattatttttccagatgagtttttgggattttttccagaacatcatagtgttctggtattttagtactgcaaaggatcatggagatcatatcactgaarttcattttatagatgagaccaagagagtatctttattttatgacagaagcagaaaatctgactctgcttacttgyctctcctgtgccatgttttgtgtagaaaaacgtgattcgtatattcctataagtagaaaattatcccagaatcaaagttgaaaataacatgaggtcaaatgtataatgacctcaataatctgatagccaaagcctctaagaaaaatgttgacaattagataaatgttcagcaccaagataataacttactttggcctcttcaattcttgtgagctccagaagttcaagagatgacgattttactcaaggaaaaacttccttattcttgaacttggtacaaatatatgcaatgaaacaaaaggaaatctacataaaaactaagggacactgacaaaatctacttattaaacaaatttaagtaatttttatatcttattctttactaatgaaagctgctatagtttacatagatgtgattccctttttatgttttttctaatcctataatgttctcttcatgtatcctcagatcatttctgagatttgttctttcttatctgaatttcatgacttagttatccagctattctactgtccaatttaaaaaatccctctaattatatcttcccagatcacattaaagccttctaatatgtccgttcagctcttttgagaactgtcatttaatcgttttcctacattctatggatatactgtaaattgttcagcaagctttcataaatccttatggtgctcacagataacccttcttgtgatcattcatacgtgaattattttgctctctcaggtttatatagtataactgttcccttcatgacatttacagtatcctcctaaaccaacaaaatacagtggacatgggagcattatgaacaaaaaaccagttttccatttaaaaagttttaatcccttttgttagtctagcacatgtatatgtgctaaagttaacttagtaataatatattttacttggagtcatctttttattccattgcattagtttccttcttmaataagctttcgttttcttctcagttattttatcaactctcttgtgaatgatgatgataactgcctgacaaacatcgaaaacaaatgtgactaaaagactgcagagatatatagcagagatttggacacaccstgagccaaattacaaaaacctgacagtacagggaaagcaaatatatatctattcaattagttaactaaagaaagagcaaatgtgatggcaaaagcaagtgtcaaagagggaacaaatagagggaacaaatgaaggagaagaagaaataattctgatagtagttgaaaggtgagatactgataaagaagagaaagaccttttcccatcgaattatcctgtggtgaacatagcaccacgttgttaaagaatattttggtattcctggaagcatttacctgtggcaccagcattatatgacatgttttaaaaactactcacatcagataaaggcagtctgtagaaaacgagagaatgaaatgcaggaaagaattattctagaaagaggaaaacgcacaacacatactcccgaaggtatttcctggcctttagtacttctgcaaagacatttgtagatgtccattttctaagaacattaggctgtacaatagtaaatcataaactctagggaccaagagctgaaccactccaaccatccaagacagaaatacattgaagtaggctgacaagaggagaaaaatagtttctcaaccaagactctatccttgacttccccaattttaacatgaatacatgttgcagagatcaactgctagtacagacacacattcttcttcacagtagctcttggaaagcttcctacttctactttggatcatacctgtacttgggataagacacttaagttaccctttagtgaaaatgcacatttgaacataacaccttctactttttttccttttcttaagaaaagcacctttagtaatggcctttaggctccratgccaaagtacttgcttgggtgttatgcctccgccttttagccctcagtgtcttcgttttgcatttttgtgaattataaactgttgtaccactgatatacaggactgtatccataattatctttatgtacagaaccgtgaycataattgtctttaaactaattttttttacattttttcctcacaattttgaattttatttaaaatacagtccttaagttcttctatctgaagtgatcctgttcggcttattcatttttattttaatcttaagccttacaaaaccttaaacatctatgcccttcatcatattttttcagtacttcatagtactttcaaaattgttgttttctttgctgacacaggtacctgctaaaggataaaaatctactttaaatatttatcctatagtcttaaatcttcccctaaagtttacccttaacagtttacgtatgaatctgtytcatgccattactaaattctctcagattgtcttttaaatttaataggcaaacttccctgattggaatacccagcctgctcgttactagctgtgtgaccttgggcaagttacttaacttttgtcaagctaagttctcatttataaatggagatgatttgtcatatgtcgttcaactattagaaagattacatgagagaatgcttggaaatcacttagcacattgcctggtacatagtactgattactcaataaatgtttgatgctaattatcattaattctgatataaatatttaaattcatttttatttaatcttctgctaaaaagtttttctttacgctaaagattaagtagttttgtctcatagttgcatgattcagttgaatgaagaaaagattttccctgaaccttttgatgagcttagttgggctcctgggtctcttgaaattgtcagtgaaatagtagggttactatgaatttgatctaattaccatctgagccagcaattatraacaacagtttataattcacaaaaatgcaaaatgaagacattgagggctaaaaggcagaggcataacacccaagcaastactttggcactggagcctaaaggccattactaaaggtgattttcttaaaaaaagaaaaaaaaaagtagaaggtgttaygttcagaaaggaagaaatatgatttcagtagtagcaatgaattcattttatatattacatgaactttagtgcttgccccattttctaagaagagcaaagtgctagcaaggacatcatattcttcacatatgggtaactaccttatcaatatttttcactggcactctgtgctcacaaaagtttcctttagaagatgtctgtagtaacatctaagatacatcaagtctctgcttttgagacatgagacatttctagtaattctgtcactttgcttcctaactgttcattagactctgtcttagggaggtcgtatgatataatggaaaaataacagtaattaggagaagacccgagctcaaggttggggtttaattctgtgtattagctagagctctagctctgcatttagacaaatccaggtttgaattttggttcctsttaactaactttggggcttaaagttagttacttarcttccaagtctcatttttctgcagctctagttacctctctctctatatttaacttggttaagcctgtttcttaatctgtaaacttggtatgataaaacctacctcagaattttatggggataaattatataatcagttcgtagtccctgaaatgtagtaggttctcaataaaaagtactcactttcacttacctcctcttcagctatactagccatttcagcaactgattattcagtagtactttgtcgcattatgtttttcattaagtattcatttacagttgtttcatgtgtttgtcttttttttctagattataaggtatttgtgtctttgataaaaaccttttatatatctccaaagtgctaagcacatagtaggtgctcatcatatacytgttagttgaatctgtttacttgaaaatttkattccttgtctacttccattaaatgcaactggaaccattaaaatacaaatacagtgaggcttattggcttgccacagctccagaagatgcagtccataccaaatgacaccccctggagttgtcaggttgttcttcatagttgaaggkgtgtggaaaaatagttagttattccccaaactcgagctctaaagctaactatcatggctgggcgtggtacctcaggcctcacgcctagcacattgggaggctgaggcaggagaatttcctgaggccaagaatttgagaccagtctgagcaagatggtgtctctacaaaaaatttaaaaaattagcctggcatggtggcacacgcctgtagtcccagctactggggaagctgaggtggaaatatcactcgascccaggagtttgaggctgcaagtgagctatgattgtgccactgcactccagcctgtgccacagactgagaatctgtctctaaaaaaactcgttcttaaaaaagaggtatcgcagttccaattctaagctgggtgataacaagtgaaaaacagaatatataaattaagcttacagtggacacagaaagtggcttccattgtcttaaaacgaaactgatagtttctaatgtcgttggttaccttgagatgaaaatggaatgatattcagtaaggaaatgtacagaataacagctaaaaatgaaaggcattcataccaattttgaaaaaagtatgatagtgaacaastacagcaaggcaaaaattccagcatgtagagggtatagcaattttgcattgatttgtacatcttaacaaccttaagctgtacaaatagaacaataatatctaaatggtgtgatgatcagcccacagtacacatcattgatgagaatttcactggtctcaacctttctcatgctgagtcctggctttgtaaaatgacttataaaggtccaaggatttagagatgattaagagataagctggcattctgtaaaggcaccatcgtctatcccctgtcttatctagataaagaatgtagtgctaaatcttgtaataatattgtacaaatggaaattcaatcttaaggattattttttccatattgttgtatttcattgtggtgtattggaaagtgatctggactttgagtgagaagatgtgatttggaccatggcacttaaaaactctataacctcaggcaagtcttttaatcttctctgagcctcagttttcctcatttttcaaatatagagagtataacatttatctcataagacaagttgtagtaaattactgttttacaaatgtaagataacttttaactgtgagattccatattccagtcttacattattatgtttatctgccacagggagaagtcctcagataaaaatgtctaccaaaagactgacacgtggagttaatcatttgacagatgcaatgcttccacccccaacaaatatactttcttaacttctgtttgttatcacttagggaaaaaaggcagtcaacaaatatatttmattctatctaggaaaartgtagccaaatcttttttcccattaacaaataatgtaagccttaatattcaagggtaataaaaaatacaagtcttccaaacagttaacttactgaaaacttttttaaaatcaacatttgctaaattcagaaacagatagtaggtactttatttatatatatataaaattactgtcaattttatatatatataattttacataaaaatataattttatatgtatgtaaaattgacagtaattttttgcrgaaaattcacaatccagttttttgattccacactgcacatcccaccccctcaagaccagagaacacagggtctaggctaacacatcaaaagcagctctggagacttaattccattgtggtaatacagcyttcttactctggcagaagctccataccgttcagcaacccactgaacgtagggaaggaatgggaagctcctgtgttccaaaagagttctgaactggctcttcatctgtcccttakcccctgcattctagttttattgttcttctccccccagattgactatccatgttctggtcaytcctcattgttaaatgyggttaacactttacataggcctctctgtggaggctgtgtagaaaattggcctgagcactaggagactggactgctgttgccccatgaaatgacagatctaaaaagcttccattcccagagatgttttcctactctcaataaaggcctagatttctttaggcctttttagaagaccacttgttttagactcaaagacttttctgggtttagcaatcttctattacagagaagagagccccaggacttttggctaaagaattctagctaagggccacaatgtacttctcgctagcattctcatagaacacatgtgaatgtagagtagagattaaaaagaatgactcagtgagttacactacccacaaggtcartgggccggaatgaaaattcaaccactggcctatctgtgcttagtgaacaacccagaccttttttcccgtttgcaccttttttggataccaaatgaaatctgagcagctgccccttacccacccacataagtgatgtgagacaggtgacattatgtaaccrctgggtcttcctgacttcctctccagtttaagaacaggaagagcagtgcacaaawatgttctgtcgagctgaggatatcggaacttaaccggcttccacttggacagaatacatttgttccagaacactgtgtacattctgggttttccaaatatgagaaacagatggagtcattaattcaagataaataaaaaaaacaaaacaaacagcaagccattatttgctacctgttcagatatttcwcaggaagggaaaaggaacaaacaagcttttgatayaccctcggtctccagtaaccaccagtgaccaaatccaaagttctcttcatgtgacctttctagcattttagttgacaagcccctcttggaaacttcataccctggattttgtaacatggcattcttacaccttccttttttctcttagattatttctcagtcctgaatatacattatcaagtcctgacctttctcatgacatccagaaccagacctgaataccacattaacagttcacctcactacgttaaaaaatcattatcatctgcctccaaatctctttctccaccccttttccccgacactgtcattgtcacagtcacacaagatggaaatcttgaagtcattttgtcctcatcctcatccttctttatgttatttggcctacattacttttctgttcccacagttgctgtcttgagtaccttgtgtctttttctgactataaccgagcctcttaaattgtctcccggtatctagtcattatcccccataatacatcacttattgtagggtagtgtcagaattattttaagatatgcgctgatcatgttgcttcttcattaaaattcattaatagctaataacaaagaggaaggcaaagttaatacatgttccttctagaagatacaggtaagcaaaatgaagaaaatatattcataaatcccaacacccaggtcatcaaatgtcatcagtttagcctgtacatattttgaaccttgggaattatgtaatacatattttgtaagctgcttatttttcttttatacatcatgagcatattcctatgcagttaactacattctacaatatatatgattttacacctatgyagtaatatcaatgtatgaattgccacaactattttaagttttatgccatccagctttttatggtgtatctttcagtacaccctgtggtttaatacaagactaagtaactgctgtctgtgttagtttatcctacaaactaagaatggcttctacagttctaaatcattggggggtgggacgtcaacaaagaatattytgtgacatgaaaattatgaaattcagatatcagtgcctatgaataaagtttcattgaaacgcagccaggtttgttttatgtgttggctscttttgcactacgacagttcagctgagtggtttcagcaaagacccatggcccacaaagtttaaaatacttaaccttctggctctttacagaaaatgtgctaactcccggtttagccatgctgaacacagcactgaatatgttcccatactttcatacctttcctcatccagtttcttyggtcgaggctgctgtccctgcatcttrcttgttctcagagttttgctttttcagttcttgtawcaccgtcatcatctcaaatatgtcactgtatcatacttaatcacacccaggtctttcctttagctaaaagaaatrtaagggccatgactttcagtcatttcattttctgcaacatgcttctatgcacagaatctagtacacaatggttgttaaatgctgattgaaacagacttttgggggccctgagattaagaaaatagctaacacttgcgtgtttctctagaaaaatcttttgaatttcaagtaataaacttgctaataaacctatggaatattaatccttagcaaatcaaagacagcattttcatctaaattgtggttttctaccatgagggagtgctgaggagagagccagccttaaggagagaaacggtttgaagtttcttctttgtgtaaacagtctctctgcatccctgatggactttaagcaaaaataaagtgacacagactagaaaggaatggttgcttctcttaggctaggggaagtgggagcttctgggggcacatttgtgctagtcctagccttctatctatcttatcccttgtgtgcgatttgctactcttgccaattagcttccattttctattactatctcagttacagttgaccatgcatatattctcttcagaatacgcgaataagccagtcacagcaatcagtgctatgcacatgcagactactactrtggataactacagtgcgattcgttcatgactgagcgtggagcagagtccacacagaagttgatcgtggtacccaaggctgcttctcactcattctggaagcagaccgcaaaagtgaaaagcacacatcaggggaatacattcagttttcattattgacagttgtttttaaaaaagtatgatacgaaggcatttatacatttttgtgataggcattattagaaaaaacaatatccaggcactcctgaaccataagtttgtgagaactattatactgttagattaagaagcaaaagtatttattagacagataaatgtgaaaagggaaaaaaatacgtgtcagatcttgtttagaaatgagagactaattccttgagtgataatatcaatataaaacattcatactggaacatactttggaaatttaatatttataatttaatatttatataatgaaaataaaagtgaaacctgaaatactgattagagaacagcagttcatacttttctcagaaacgttttaaccagtcaaaacatttttgacatttttgtgcttcaagtgtttccagtgtcttgaacaaataaagaaatttttataactatttaaaatgaaaatgatagttttgaaaatgatagaagcataggaagtactctaattgtcctacaataaaggatacatctaactaacaagtaatcagtttcagattaaatatatatttatcatttcataatgatataaacaactgattgttacaccaggttaagaaaattactaaatgaaaaaaacagtagcataactaaagataacattaataaagtactcacagagatccttttactgtgaatatacctaagtatcataaaactgctaaaaagttagaaggtataaaattaccagtatggatcagattagtatttttgcttttacaggggtaatatcgttagcagcaataaagattacctttagtgctccgtaacttgaaatctgcagagcctttaaacactaaacaacaaaaagctacaaatccctagttttaagtatcagttcattttatgattaaggtttcttttttcattaaccctcattcttcagttagcttcatcttcagagcaagstgatgatggcttgtgtgtgctagcaggatgaacgctatcttttcaaaacataatgccacagttcatgtacagctggcacatctatctgctttaccagcagtgtttttaaggatcatgcggattgaacagcaactacagcttaaggccctgacaaggtttactgctgacattcgtcttcatggagatggtcacccttatcgtacgctttattcgttacttattatcttgaaagtagaggcgacgtctcattgcatcctgatatcaccacatcatttttatcttctaatttaacaatttctcagaaacagctaacaagagtaatttttctagtttgtattgtactgtgactttatttacattttaattgatgttatataatatacrctgtatattatataatttaaatatatatttcatgttttatactaaaatgttacattttaaaatacatatttattcttgcacatagtatcaccagaatcctaaaatattagcacgaaaagaacttcgggaatcatccaaaacaaacgttcttttcactaatgaggaaaccgaggttcagaaagacgaaacaatttatgcctaggatgatatgatttaaacatccaaatataaaacttacctactttggacatttttccagctacatgttttttttttgatgttgttgttttttgttttctttttttaagtacaagaactattaatttcatttttgcttttatatttaattaaaaattggtttgtctctggttgccttgcaaagttgtcttgtgttgtcaagactcaaaaagaacatgccacgtgttagcagaaaggtacagatgtaaacaaaagcttcataaatgttatttaaattgatttaccatcttacaaaattaaattttgtttcataaattaaagctttgcttagggaagtttaaaaaaataacatagttatcttttacttttatatgtacaagtatctctgctgatgtttcatcagaaattttatgattcatgatttgtgtatactctttttggttgttcaatatgatgaaattgtaaattaacaaaagaccaagtgattaaattatacggttagagaaaaaatatttttaggacattcaaatgacccacttcacgcatttgtttcagtccattcccttgtatttcccctacattaccattttaaatgctgatttaactgctgttctagccagcaatgaaaggaatgtctatgtaaatttaaaccacaaattaaagctttcagcatcttctctcaccctgaccctgttcycaacctaagcctcatctggttaaaggcactagtttagaaaaattgccctgatgtaaaaattacaattagttgaatacaattatgacattttaatgttatatttacatgtgctaatttagaatggaataacaaacatattgtattttccttatgttctatgttcagcacataataattttctttctttttcagctttttaattaaatgaagccaagtgggatttgcataaagtgaatgtttaccatgaagataaactgttcctgactttatactattttgaattcattcatttcattgtgatcagctagcttattcttgtgtactttttttaaactgtgggttttcctagtaaatttaatttacagaaatcaatggtagcatttagtaatctacaaaggaaatatcaaagtgtttttcaagcctgttatattsagtgtgtgccacaggattgaaataaatgacaatgtaattatgaattcatgttttagagctgtttactcattagtaaaggaccgcaatgttagtaaagaaaacctatgaaatgtatgttaaagattyttagtattgtacagggataaagcaaatgcatgaaaatatgtcatgtactgaaaattaaacttacttcagtttcagttataaaggacgtgcactgttacgaatagtgttttgttattaattataactagataaaggtatataggacagggaactggatgaatggtacctacaatttggatgcctaaccaaggactagagctccttcttgagatctaaatctaaagtaaatgtgcattaaagcagtgtgcttcaaaggcatcagacgatgaaagcaacataccacaactaggagttatttctcaaacttaaatgtcctctgggaatccagacttaaaaataagagcaaacttaacacactatccattttcgagcaaacytaacccactatatccattttgctcatgtgttttatgcaaccagctttccatcaaatcctcaatcyttgaatccaggtaaaaggttaattwtcctaggattagtgaatgattcaatgaagctttcttgaaaacaaacataggagtgtaatgtactattatgtttgtatcctgttttagtttataaagcactttcacatacattayggtatttcttcctcacaataaccttgtaaattagtcaggaaatgtaaattttatctgactcatagaactaatggaagctgaaagccaaaaataaagtttataaccaggccttcaaactctcaaacatggatttttatattctgtggagttatccaaattaattagggtttaggaaagcagttcttcttgagtcagttcartaagtgtttgctttttgtttttaaggtttgttatctaattttcattaagatttgagtaacagaccatggagaattgttttcattgggagttccagctatatagcctcaaacaagaaacgggtgtacaaccattgagtttacttacttaaatctgtgaatttcaatgaagaatgggaatataaaggcctactggggcatgtttatcaagttatatcccagggcaatgtgtatgctagcaggatgaatgctatcttttcaaaacataatattcagtgaaaattacgtaataattgtaagtttataatcatactcccaaatctgttactaaaaataacataaattctcctagttcatgtacttagatgaataaatttagttttggaatgacgtttatggaaaagcaatagatgaacttaatcatttgatcactgcctatcactaggcagaacttgacctgtaattcttaatccattgtagattttttacattttactcaaaacttcatacatagagactctcaggtcaaattttacaagtattaaacatttgttaattataatcacttttgtttgtatccttaaatctcagaattatcttgcagttaatatgcagctgattaaatgatattacaaattatctctaatctcactgtaaatcttttaatcatatcaaagtcaggtcatcctcagacactataactaagatagataaggagtactttactataccatattagtaaaggttttctagctcttattttctaatttcctctgagcatttaaaattacatccagtgataaaaacaatatttttttttcagaatttcatgctttaaaaagctgtggcttctctatagacaactgttacattagggaagtgattctagagcaaaatatactgcctcaacataagtcgttactgactggaaaatgctataggcagaattgcaaagagtggctcaaacatatagtttgcttgcagaatgtaacgtgcaaaatcacatacatgcgatgtatttacctttgctagacaatgagaattgaataattgatttgtacctggtatgttatatcctccagtgtcactttttaaccagattcactgtgcgttccaaactgtcataaaaattgattatatgtttaacaattgtttttctactacagtggagagaaaaatcccaattataaaattccacctaaaggagtttcattttgtaataacatctgattaataacttgttgcattttgcttaacatactgttcctggcattagatattcacatgagtaagcccagtagcattttgtgcttactgcagttttcttttacacacgaagtaacatcccttgtcaattacaattcagcaggcatggtgatttggggagacgactagatgttgctgtaaccgtagagcgtggcaagtattccctttcttgctatcacctaagcaaacctccctaagggtacgtgaagggagtggttattctaaataaggcatgacaaattacttttcaaccagtgacattaaacattgtgttttaaaaaggactggtcactggggcgaacacattagctggagcatgtagggacaaaatacttgaattgacgcttgaagactcaatgttctcaaagtccacagagctcattaagtttaaaatagtaaaacaaggtcttcttcatactccagcaatatgctatattggatcagaccaatatatgtaataatgttttctctaatagtaggaaaaggatgagcattgtagctagtcacactcaaagggtacaagtatgcattcattagctcctaaattccctgatgatataattcacgagcatctgccatttatgaattttcgatattcctctatgtctgaaatacatgcayatatttatatcatataccaagggtccaactactatacaaagatttaacaaagcatctcaccttccggccataataggaaaatcatgtcacatttacccaartgtggatacatctatctatttccattaaaaattatgcatagatgtcaggaaaaatgacagcaaggaattccagggacatacctgtccttagaaaaacaggaaaaaaaaaaaacactgtcacattccattttattggaaatttgtttaaaaaaaaaaagtttaccaaaccactgcttaaaacaagaaaatgcttaaattaaaaaagcaactgaaactcagctggatagcttaatggtattttatcttaattcaccctctttcctccccagtcaggaatggtcttgaagactgcagcctgcattccttatgtgggttcctggctttggagggagcagaatagacctcattcttaagaaatggtgtttgctttgacctatctagggtcttgccttcggttgacgtaactcagaagtctctcaggtgaaaaagtagctgtgctgagaatggtttcttgaaagcattgaaagtaaatgaagaagccactgctgcctggagaaaagattgaagttgggacaaatagacatacactgaaagcctggaaggaaaagctggatagtgaaatactttggagaataaggaattggaaacaatgctacatgtaacagggactctagaaggacatacacatacccagggcaggatccatgttcagaaaagtcctgagaagattctaagctttcacatcttgctgatattaatatttacacccagaccaaacaggaagtgaagactaaaacagtggtaaacagcccagataagtgttgaaagagttccccaatagagaacctgtctgtaaagtggggagagtatttttctttttatcttttttttttcttttgtctccaggcatttaaggaaagttctgtcaaactactgactgaccactaggctaatggaataaatacacagacaacatgtgacagtttagaaaagtcactaaacaaatcactgctacataaactgcaattcacaacaagccgtgataacaaaacttggggagagggcagaatctagtttccagagttgccacattataatgttcaggctatccactttataaaaatttaaaacatgaggcatatgaagagacaagaaagtcatcttattcacaagaaagaaattaacagaaactgaccctgaggcagcacaggcattggacttgctagacgaggacattaatgtcttcaacctactcaaagagctaacagaaaccatggacaaacaactaaaggaaacagagaatgatttatcattaaataaagaatatcagtaaagagataaaaattataaaaaggataggaacagaggaaatcaaattgtctgtttgtagatgacatggttgtacatttagaataccccatcatctcagccccaaatccccttaagctgataagcaacttcagaaaagtctcaggatacaaaatcaatgtgcgaaaaccacaagaatttctatatcccaataacagccaaatcatgagtgaactcccattcacaattgctacaaaaagaataaaatacctaggagtacaagttacaagggatgcgaaggacctcttcaaggagaactacaaaccactgcacaaggaaataagagaggacacaaatggaaacacattccatgctcatggataggacagatgaatatcgtgaaaatggccgtaccgccaaaagtaacttatagattaaatgctatccatcaacctgccattgactttctttatagaattagaaagaaactactttaaatttcatgtggaaccaaaaaaaagcctgcataaccaagacaatcttaagcaaaaaaagaacaaagctgaaggcatcactctacctgacttcaaactatactacaaagctacagtaaccaaaacagcatggtactggtatgaaaacagatatatagaccaatggaacggaacagaacagaggcctcagaaataataccacacgtctacaaccatctgatctttcacaaacttgacaaaaacaatggggaaaggattccctatttaataaatggtgatgggaaaactggctagctatatgcagaaaactgaaactggacccctcccttacaccgtacacaaaaattaactcaagatggattaaagacttaaatgttaagacctaaaaccttaaaaaccctagaagaaaacctaggcaataccattcaggacacaggcatggacaaagacttcatgactaaaacaccaaaatcaatggcaacaaatgccaaaattgacacatgggatctaattaaactaaagagcttctgcacggcaaaagaaactatgattagagcaaacagacaacctacagaatgggaaaaaatttgtgcaatctatccatctgacaaagggctaataatccagaatctacaaagaactgaaatttataagagaaaaccccatcaaaaagtgggcaaaggatatgaacagacacttttcaaaagaagacatttatgtggcccacaaacgttaaagaaagctcatcatcactgggcattagagagatgcaaattaaaaccacaatgagataccatctctcgccagttagaatggcgatcattgaaaaggaaacaacaggtgctagagaggatgtggagaaataggaatgcttttacactgttggtgggagtgtaaattagttcaaccattgtggaagacagtgtggtgattcctcaaggttctagaatcagaaataccatttgacccagcaatcccattactgggtatatacacaaaggattataaatcaatctactttagatacatgcacatgtatgtttgttgcagcactgttcataatagcaaagacttggaaccaacccaaatgtccatcaatgatagactggataaagaaaatgtggcacatatgcaccatggaatgctatccagccataaaaaagggtgagttcatatcctttgcagggacatggatgaagctggaaaccatcctcagcaaactaacacaggaacagaaaaccaaacaccrcgtgttctcactcataagtgagagttggacagtgagaacgcatggacacacggaggggaacatcacacaccgaggcctgtcaggggatcaggggctggggagagatagcattaggagaaatacccaatgtagatgatgggttgatggatgcagcaaaccaccatggcacgtgtatacctctgtaacctgcatgttttgcacatgtatcccagaacttaaagtataatttttaaaaattatgaaaaggagtcaaatataaattccgatgttgaaaaatatgatcttaaaatgaatcagttgaaattataataatatagtaataattggaaaagtcattaggcttgacaggagaataggcagataaaacaatcagtgaacttgaagctaggtcagttgttgaaatgatccagtctgaggaggagacaaggaaacatgaacacagaccaaaacactgttagacactatcaagcatattaagtataaatacgagtcccagaagagagaggaaaggacagaaaagagtacccgaagaaataatgttcaaacttaccaaatctgaaaaaagacatgaagccaatatccaagaagttccaacaaattccacatagtatacacattcaaagagatccataccaagacacattaaaataaaactgtcaagagatcaggaaagaatcttgaaagcagcaagagagacgtgattcaacatgtagaagaaatcctcagtaagattaatagccagttgctcattagaggccattaaggcagaaaggcattttacagtgctaaaagaaaccatcggccaagaattctgtacctggcaaagttatccttttaaaatgaaggataaagtagtaccttcccagaaaaaagagtctgttctacatagacctataccataaaacatgcttcagcatgttggaaaatactcctcaaatggaaatactcctcaaaatgacctacaaattcaatttcctmttataatcccgtgggctttttgcaaaaataagaaagctgattcatatggaaatgcatgggatcctgaatagccaaaggattattgaaaaagaaccaagttgaagagtccttcaagctgaaaggacaactcagagtcatacaaagaaatgaaaaacattattaaaagaaataactgcatagattaaatataaaggcattatttttggtttgtaactttgtttcatgtaatttaaaagattgcataatacagtaactaaatcttgtgaacctctaaattaaaaactctacagtgtataaataaactggaaaactaacaaatatgtggaaaataaataatataaaacaaccagtggatcacagaagaagtcataatggaaattagaaaacacttgaagacaaatgaaaacaaaaattctacataccaacatttatgagatacacaaaaaggaatgttcagagggggatttgtagctggaaatgtctgtattaaaaaaaagaagaaaggccgggcacggtggctcacgcctgtaatcccagcactttgggaggccgagacaggcggatcacaaggtcaggaggtcgagaccatcctggctaacacggtgaaaccccatctctactaaaaaatacaaaaaattagccaggtgtggtagagggcgcctgtagtcccagctacctgggaggctgaggcaggagaatggcgtgaacccaggaggcggagcttgcagtgagccaggatcgcgccactgcactctagcctgggccacagagcaagactccgtctcaa

SEQ ID NO: 94413 - DNA, 44168 bp, Homo sapiens
  misc_feature (1)...(44168): n = A,T,C or G
tgccacacattatgggcatcttttctttacaataaatattttcattattatttttaaatctgcagagcaatatcccattgtatggctgtactgttatttaataaattctctaccgatgtcatttatatagcttccaggttttcagtattacaaataacaccatgataaacatttttgtatactttttcagttacttccttaggataaattcatattaagaaaccgaacacatattgccaaattaccctctccagaggctgatcttatcacactcctaccatcaccaatgagagcatgtagctccacacattaccaacaacagtgatcagcaatttgcaaatctatcaggcaagaattacattcattgttgtttaattactttgactacttgctagggaagcatggatcaaattctgatagaaaatttcacttcagctgcagaagctgctaggatcagtcccatgttggggaagtaacgagcgatgtgaatctgataatggcttaggtgacgttctgcttatattatttttttaaaacaatctgttcttgaagtctatgtaattaagttactggctgttttgattttcattttcccttttggtctcgaatatgcaagaataacttgagaagaatctgaaagaatcatgcagaactcactcgctaacctcacgtcccccctcacctcaatgtgaaatgggtctaacacttcagtttaccaatgtgaccggatcattcttctttacatgctccaatttcctgctggaaatacttctctctctctctgtctctcacccagcagtaaccttatcccatttttcccttccattgagttttgactttataccaactggctccctttccctgcaaagcaggactgggcctgcagctcacatttttcattagaaaacccagcaaggcaggcacgtcagtattgttatgtgagggcatgctgagagccagagtgcacgatctacctgtggctgctttaataagtaggatgtgacttaggagttaatcacaatttagaaagcctgactaaagtgttccatagatggagcagacaagttgttagatactgaaaaaaaaacaaaaaacaaaaacaaaaacccaaagcttttctgaactcttactgtgtaccaggcaccatgttcatcattttccataaactgaatgatttaatgttctaattatactttcagaaactgagaaccaaagcttcacaaaggcgagtaagtgacgaggtcagaattcaaatccaattacaaagctcatgattttcattacaccacgtccttgatagtgcctatgtgtgatggtttaaatggctaagaaatcaagaatgagagagtcaaagttcccacatttggtcatccctgtagactttattctagctcccccagcctccagtccctcactccccacccccaacacccacacattctttatttaatggcttgaccactatagttagggccaatttccctgggcttatggtactagtgccaacttagaatagtggaatatatcaaaccaggcagccatgatgttcactatgggttcattacataatcaagccaatttcaatcaagcttgtagggttaggtcagtaacttgaaatcatcgatgtccatgctggtctgtgtccagaaataatgactttgatagtgggaggaagaagaggaattttccaaacagcccccacaattctatcctaaggactctgagaatagttgattgcacatgaggctactttataagtggagtggctccagaaattaacttacgttactgggtgtaaaagatatccattctgacattctcacttaataaatatttgggctaaggataagccaaagtcatgctggacattaacaagtcttttgacttggtgaacagtgtggtgccacacttactggcagttgaattgaaataaagttgaattgaactaaaagcatcttactttctgtaacatcttcaagaaggtgttaacaggttagacactcccttagcacacatccttaatgttttaaacattactctttgcactttttggttctgttcctaggtaatagaaattgggggcacctggtaagtccttgattagtgtcaggcaccagtgggatatacactttctctataggtcatgaactcaaaaagacggtggtctactgtggatgatcccgttagttgcctacctagatttacttcttcagccccttccttgctggcagagctattttgttcaggagctaatgggccccaaactagcccttccattctcctttctgattagtggcttaattatcttaatattgtaatgttctattctgatgatggtgatgatgatgatgaaggctaacacttactaagcatttactctgtgctaggtactttttaaagaactttaaaaggtatcaactcatttcgatacaggagttaagaagaaattgcttaggcagatagtgagggtatgggagtcctcagtaaggtttcccttttaataaaaagcagccgccaatcattttcttttctaacaaagagcagcctgtaaaatcgagctgcagacagacaagcaaactagaagcttgcacaggtgaattctggcagttgtgcccataggaatatactacctgggatgaggcatgttcaaagtggcggccccatcttctctttttgccagcaacgtgtacagtaaggagcagactagatggcactgcccaagtggaaagcccatttgtataataagattagggttgggagaccagccttccccttgctacataaacgttacacctggtcaaaccaatctgtgagccctacataaatcagacactgcctcctcaaacctgcttataaaatctgctgtggtccgcccatgccccttttttcagacgtcttacaaggagctgctctcctctcccctttcttctggctaytaaactttccgctccttaacccacccacatgtgtccctttccttaatcctcttggcaggagatgctgaaccctggatatttactccagacggtgatgccacttcaatttcattcttgtaaaccaaaagagatagttctcaatcaatttagaaagtttattttgccaagcttaaggacgcaccctgacatagcctcaggaggtcctgccgacctgtgcccaaggtggttggggtacatcttgcttttatacattttagggagacatgagacatcaatcaatatgtgtaagatgtacatctgttcacttcggtaaggcgagacaacttgagggagagcttccaaatcctaagtagataagagacagaaggttgcattcttttgagtccttgatcagccctccactgaatacaaaatttagtctggctcagtgcatttgcatttttacatgaacaatagggcagagaaagcaatcagatatgctcttgtctcacgcragcctcagagggatgacatcgagatctgtctgtactttgtccgtaaggaattttcttgtgggcaaattgtgagggaggtatgtagctttttatctttgtagctatcttatttaggaaaaaaatgggaggtaggtttacctgacatagttcccagcttgtcttttcccttggcttagtgatttgggggtcccgagatttattttcctttcacattctcctaataaagccatgaggaaggtaccattattaaaccaaagcccagagagactaacttgcctaaagtcacgcagctagaaagcagcagctgaacccccgtagtctgattctagagtattccctcttaaccactatgtcttgtaagccaatgagacaagaaggctgctggaggaacatctgggacactttagaggtaagagttctttttcttctttggaatgttgtcatttgtacatgatacttggaactgctgcagatatcttgtgtctataataggagtcacggctgagtatgttggagtaaaaagatggaagccactaaacattttgaagacatccttgagcaaggttgaattaactaaccttggagctactctacctctggaattgtttttcatgtgagaaaatgaacccagtatcctttaatctacttgttagaactcctgttacttgtagcgaaaagcactctcaccgatacacatagaaacaagcataattctgacctaagacaaatagaaatgagcataattctaacccttttaggtaggcagaatatttgcactatgggcaagattttcattcagacaacaaatatttattgaatgccttctacttgccaagtatagtgcaagttgctgaaccaaacaatataggaagggcaggtttctccatccatggaggttataatctggtcgtaaatgtagtagtgaaagtgcgggcaggcatattttgggacggtatcttgaggactaatctggattgggagtcagagaatgccctaataaaatccagtaaaagcatgcattacagattcaaaaagaatccatataatgtctatctcatccatcaagtatttgtgacatgttttggctttagttgtataagaacagtaagtatgtgcacaatagtgttaggtgtataagtatttttattttttattttttatttttgagacggagtctcgctccgtcgcccaggctggagtgcagtggcgcgatctcggctcactgcaagctccgcctcccgggttcacgccattcccctgcctcagcctcccgagtagctgggactacaggcgcctgccaccatgcccggctaatgtcttgtattttcagtagagacggggtttcaccgtattagccaggatggtctcgatctcctgacctcgtgatctgcccacctcagcctcccaaagtgctgggattacaggcgtgagccacgcgcccggccaggtgtataagtatttaggtaactttataacaaaatacatttacattaagggccagactgtcttttccttttaaagggaaatactgaagctaatttaggagaggcaaactaacataaaatataaggcaaaggagtgggaaccaaggcatttggtatctatttctagctcactgggcagcagtcctctgtgtcttgaattctgtgatttgcgaaatatgattcataggggttgcaatggaatatttctgagtttttaaactaatgagggataaatttttaaaatccctgtgctgctgtgaatgttctagaaattattcacaagtttattatagcaaagaaaatgggcaaaaggaagggggtgggtacaggacgtgacactccagaaaagaaggcagtgacgtaaaaaatcaagaggaagtccacaccaggaaatagtgctgtgcacattagagctgttactgaataaatacttgttggaatttccagagataaccaaacaaacatgaagaaggaagtgggtttttttttcagctttattatggaaaatatctaatatgtacaaaagtaccgagaatagtaaataagaacgaccatgcagcttctatggccttacttaacggccaacttgctttatttttcacctcccrctccccactattctcaagcaaattccagacatcataccatttaacccctaaatatgtcgcacatatctctaatgcaaaagattgggaaccaagacatttggtgtctatggctagcacactggatagcagccctctgtgtcttgaattcgtaacatgtagaataagatttatagtgggttgcaacccgamtttatttttaactaacagcaatataagaggaggtggctaatcctcacaaggctctccatgagggaagctcacccctataaatccaggcgggcgcttcgttacccaggagcccaaggtgcagctccgggacgcttcttttcaaggccgggacccctgcagcggcccgtaggacacctccctttccgagcacggactggtccccgcccctcccccgggaagtctccgcccacagggccccagcagcccccgcgcgccctcgctccctcccgtcagcccccgcccctcggcgaagggagcggcgtgccgtccgggtcgcctaggcctggggtcgggagcgcgcacgctgtgcgccctgggcgcgctcgggattctcgcctggcgcggctggggaaggtgaacagtgtggcccgccatgttcttctccgcggcgctccgggcccgggcggctggcctcaccgcccactgggtaaggaggctcaagctgagcccggcgctgccgccgcccttctcttgctctccgtgtctcccttagttttgggcgcaggagagccctgggctctgcacgggcctgcaggcggcggcaaggacactgcggccttagccctcttagggaggccgctgcagccccaccgtgagaagccccgagggagggttgccatactgggaagtgtactcctagtttggtcgaggaggacagaaaagaggggctgcttggtgatatatatatatatgtttgtttgtttttgctgttttgctgtagcgcagaatctaggcctgctctggccagatcagtttcgaagaccgtcgctccgaaggaggcacctctcgtttcaagcctagtgacctcgatgcttttaggttgcagcatactggagagctctggcttgcttcgtgaaggcttagggagaacttcattagggctggaaaagggtggccaatgtttgatttactgcagttgtgctttgcatatcggaaatgctggctaaataaayggtatcaaactaactctgaaagaacggcgccgcaaataacagcacccaattaaagaaccacaggattttagagattaaatgatctttttgagatccaagtacatctcatggtaggcaaggaaattgaattgcagagaagttgaaacactccttcacgttaatctaaaaatgcagatttccagaaatgtcgattataacaacagggcctgttacacaagtaatactggaaagaagccttagttttgtttgttttctaagagtgaaataggttaagtcagttctcagcaagagggagctagtgtatattcattgagaatgaattcagggctttagagttagactcgagtttggatgttagcttaactgccttttgtggctctatgactttgtgctgttaatcttcctcagtttcttcagttgtaaaatgggaatattcctttttacagagttcagtctttcaataaacatttgaagtsttactgtacgtcatgcactgctgagctctagttaacagtgtggataataatgatagtcatttgataactgttttctgtatgccaagcaccgagttaaatatctacattccacatctcatttttgaggctggtattactttttcctcatattacagataaggaaaagatttagacagttcccgttcttttggaattgatagtctcatgtaagaggaactttaaggttgagacaatgtaaaagtacagtgttagagagatgaatagggtcatccaatgtggtttcaaggtgcataagatttttcctgaaggtaatactaacagattgggcatggggtccgagggtattctaggtggaaaggacaacttaaagtcttgttggcaagaaaaagatcggtatgtatgagaagccaccctctgctgttggaggtaaggtgtgttcccaaatgaaataagggagagacaggggccagatattggagctcctggcgtgccatactaaagaatttgattttagaggccgtcaggagtcagtgaaaggttttaaagtagaggaataagatgtggtttctgttttggataggtcactggataggactgagggtggaatgggtttgatttggacccagaaacagggagactaagtagataagaggctcttgcagaatgctaggtgaaagatgatgaggatcagacatggtagaaagaaaagaaattagagtgcttgtagattttgtttcttttgtttttgaggcaaaggggctagaagtataaattgaaaagcagttttaatgaaaaagaacaacttgaggtagtggaggaccattgtaatccaggtttaatgtttctggaactctctttctctccctccctccttccttccttctctctctccatccgtctccccttctccctcccccttccaccctccccccttttttaaacaaatagtacctgatatgcactatgtacacaataaatatttgagttgatgaataagtttaatttttattacacacgtcatacgtgtgtagaaaaaacaatactgagactagcaagtagagtaagctcaaaaaataaaaatcatccattgtcttgtcaacctggaaattaccattgttaacattttgatgtctacacataacagaccttacagacaatttgtttctacaaaaatggaaaggtatttatactgtttggtagcctgctcttttgtaatgtattctgaacagctttccttatcagtagacatttctatactgtcattttaatgctacatagcattccattgtgaggatgttctattacytatayaaccaggcccttctaacctttcacaagtagtgagatttcacattaaacctagcaagtatcaagaaaagtacaagaaaagtctacctaagttcctttcctaaatgagaaacctttaaagattatttacgctttcaaagaaattgcctaatctaatttctgctttgctagctgccattctcttgacgaggcttttcagctcatcattgcttaaaatatggctagaattaagtattagtttgtgtgatcttgagccatcttaatctctttgagcctcatttttcttttctgtaaactgagataatacctcataggtgattgtagtaattgactaaaagttataaattatggagtaatagataatcagaataagtttattcccttcttcagtaattgcccatggtttttctgtaatgttgatgccactttagaacttatcactgcctcattcccaagctgctattgtagtttcgaaggtgagagggttgtggtggcattttcaattacagatgctcctttacttacaatgagatgacatcctgattaaacccattgtaaattgaaagtatgtaaatttcagtttacagtggggttatctggacttaatcgaggagcatgctgaatacttatcattttcatacagttgtaaagttgggaatttgcaagacaggcaattgtaagtcagcgacccatctgtattgtgtattttttcattcatcgaggatattttcctttatgtctttaggcatgattatagctgtcctgaagtttgtgtctggtaatcttagttgatttttttcttgaaaatgtgttttccttttttgtttgtttcccatatgttgaacaattttggattgtatgctgaattttgtgaatgatacgttgtagaggctctagatcctgttttattcctccaaatagtgtgttttgttgttgctatccatatcccttgtgggcagcagatcaaatattggttccgttcttttagctaggctccttggagtctgcagcatgtacatgcatggttcagggttcagccagagatttccgtagaatttatatacagaatgtatagggctccctccccctttctggctcttccttttctaggatttcccactttaccatgtctgttgttccaaactctcactgaggcctgccttcaggctaaaagatgtgaagaaaaaacaaaaacctcattggttttttatgaatgtagactccccttctgtgtctgcctgtttggttgttccccagtgccttcagaaagcttttgtttttataaaatattttgtccagagtttatagttattattcagtggtttgccctgacagtgtctacttagccatactagaagtatgccatcttgtgtggtggtacttttccttccaaattttaagttttgtacaatgaaatgttttccccattccattagagattcttaaacttgattttgtaatgtcccagtgtatctccattgtgactcaaaggactctaaagaagttaatgtaggaaaaacaccccaaaacatttagttttttattcctgctgtaacaaatttccacaaaactttgtggcataaaacattatatttttaaccttacagttctgtaggttaaaagtgacacaggtctcagtgggctaaaattaaagtgtagcccgagcttcattcctttttggaggctctagaggtgaatgtcttttcttggcttttccagcttctagaggctgctcttggccccttctttcatctccaaagccagcaaaggcaagtctagttcttatatcacatcacttcgaccctccttctggcattcatcacatatccttccttgcctcttggtaagaaccctgtgattgatgacattgggcccacctagataatccaggataatctccctattttaaggtcggctgattagcagccttaattctcttttgttgtgtaaactaatactcacaggtttccaggattaggatgtggttatctttgagagaccattattctgcctgccatagccataaattagcagtttaaggagagagagaatgaacaaactttagtttatgcagtgaggttcagtaggccactattgcaaactgcagactcggatctttttattagagacttgaactcagtttccatttcaaagtaataaaaagttgactttcctttctctttgggcactgtttagtaccttagtgctcagaacattgagtaataaattacaggtctgttgcccatgctgtataacctattgagtgacagtcagtctgattttccaatgaggaaccttgtcactagtttttgaatcagttcaggaagcatgttataaatcagttgtaggaaatgtctttcattacaaaacatcaaagacagtttacacacattttggttagggggaaggtggctttatctgtcggatattttgctaggtgttaccccattttatgtgtgagatatatgaagattgctggacaaataaatgcccaagatcacacagtagtaagggctgggtttattcgcaagtcctgttttgttttgtttttaatctacctttctgaagttgctcaaacaattgaagttgctaagggaaatcactatgtatggtgaagatttaaatttaataggcactctaataataaaaggtgtaccagtgtaagcagactagggaaatgatttcactttgcttagggaaaagagatggaggtttaggggctttaaaggggtaggagatggaggtttaggggctttaaaggggtaagaggaggaggttaaccttggtcatgatggatgagtggaaggtgtaagttgagataatgctgtaggtatagctagctacatatacaaagacactgaagtgcatgaggtgagactgaaccccgggtccactggatgggcatttcatttctataaattattcttgtccttagaacaattggttgttgcttatatccatgtgggattttagatatctaaagaatgttttctttaatatatggtcaagatggctggaatcattaatgctgttatcttaatctgtaatgcacagtgcctgtaatacctgggctcttcatgcagcttttctataatataaaatttagccaaattacatttgttaattctctcatagtatggtaaaaattacttacattttaacctgaattaacatttttaggtaaattactgatggaactttatttggaggatgtttgtaaaagtcctcctatttctatctgaaaatacagcaaaacttaaattttagtggttaaggcatgtactgaagtcaggaaaatctgtatgtggcatttcatttatttagctgtgtgagctagggaaagtttttcccccttctttgagccttaattttctcacctgtaaaacaagataataatacctacttggtaggcttgctgagaggaataaatggattatagtgtagatttgtagtttatagcatgagatctgacatagagtaagcatttgtatttatgattatccttgaaatagatttcacaattattaacccagcatcaactttgttaaaataaaatgcactgaaaaacttttgtttttcatggaattttttttttttttttttgagacagagtcttactctgttgcccaggctggagttcagtggcgtgattttggctcactgcaacctccgcctcccgggttcaagcgattctcctgcctcagcctcccaagtagctgggattaaaggtgcgtgccaccacacccggctaatttttgtacttttagtagagatggggtttcaccatgttggctaggctggtctcaaactcctgacctccagtgatccacctgcctcggctctcaaagtgctgggattacaggcatgagccactgcacccagcctcaaggattttttttaaatgtaaaattacctagtctgaatgaatgtattgcagaccctgacttttttaggaggtttcagttttcttgcttgagctggcaataggggaggctgtaggtaacaagtcagcagatgttgtgaacagtgagaggaaggcacggagggacctcagaccactttggattcactagagatgtttcatgtgtgcactgtgactcttgcacaggcaaatagatatcttggtggatttaatctgtaaatattagggatcatctaaaaggtatattccttgccttagttggcctctaataaaggaaaaaagaagggtttttgaattgcctgaccttagtcttgtctttctgactaattagattactgcttctgtcagttttgtcttacagcttcttagtctcttattaacttctcttagctggatgcatttataatgcaaatgtctgatagaactgaaaagtgagcttcgttggatggtagtattgtktgaacaacagaagaaattcagaaaaagagtagagcccatgaaaagacaattaaggaatcctattggggagaatataaaactttaatttttgtcattttgagctattggtattgccagtgacagtaaaagggaaaggctggtagaaagagcacagggcccttagattgaaagagcctgggctcaaaatccaggtctgtcactaattgtgcggtatggggcaagttactgtctttgagcctgagtttctctaaatgtaaaatggaaataatgactcactacagattttttaggaatcgacgaaaaaaagtatgtagaagagcttaacacagaggcactcaagtttacttgactccaacgaaaaggcagtcactgttttggcctgcttaaatcttttcttttccttctgaaacactgaaaaaaaaataagctagaattcaaacccactgttaattttgagctgtatattaggttatgatcttatttacttaaaaaagttacttggttgcatgcttttcttcttaaaaaaaggaagttacttggattttcaattggactcaattggaatttcttgaggtatagacatttcagagtctaatgagaagctagattctagagaaaagactagactgtactcaaagaagggggtgggtgggaactcagcttattctttgaatcattccagcctagctaggttgttttttccagttttaagcctggtcctggaatgcctctttatttcaaagtgaaacaaaattgaaatggcccagtaagtagtgtaaagatgttaatgagaacttttaatgttttattcctttattgaaagtgtctgacatagacattacaatgaatgtaaaataggtgatattctttaaacacaccaaaaaaacaattttcaaagccattttcaggccacctgtaacttgatagggatgaataacagtttatgccagttgaaaaaaaccgagagctaagatttatcagtttatcttcactatttagtttgtttctttctttattgtttgtttacttactacttttttgagacagggtctcactctgtctcccaggcttgggtgcagtgcatgatcatggctcgctgcaacctcaacctcttgggcgcaagcgatgctcccacctcagcctctcaagtggctgggactacaggcatgtgccaccatgcctggctaacttttgtattttttgtagagacagggtttcaccatgttgcccacgctgatatcaaacccctggcttcaagcgatctatggggcttggctttccaaagttctgggattatgggtgtgagccaccgtgtctggccagcttcttttattttataaacattatctcagcccttcttatacaactttgaagaggtcgacttcggactttgaaattaagttgctcaaatgttatgctagtgtgtatacgttcaggttttttgcaggaatagaagagaagggtggcaaggattaaaaaaagattaaataacttgcatctttctctcttaacaggagcattgtaagccaaggaggcagggcttttcatttcttatctgcctgcctgtatatatggaggcctgattttcttccttaaactccttggtttcttagacctactatgttcttttaaagctttgatgtcatcaaacartcaggtggctaataataaggtcatggcctttgtaatcatctggccctaggatctaacataatttctgccaataattagtgatgtgacctaaccttgagaagttttcataactcatttaaatttctgggaataatacccaccttgcaggaaactttaagaattaaataatgtgtaaaaagcttagtgcctgacacatagtacttctaataataatagctaatgatagccaacactaatacagtacttaccatctgccaagcagaatattaagcactttacatgaagtacatctttttttttyccccccgagacagagtctcactctgttgcccaggctggagtgctgtggcacgagctgggctcactgcaacctctgcatcctgagttcaagcgattctcctgcctcagcctcctggttagctgggattacaggcacgtgccaccacgcccagctaatttttgtatttttagtagggatggggtctcatcatgttggctaggctggtctcgaactcatgacctcaggtgatccgtccgcctcagcctcctaaagtgatgggattacaggcatgagctactgtgcccggcctgaagtacatcttttaatgctctcaagaaccctatgaagtacatgccgttatttttctgtttttataaatgaggaaacaggctctagagctgagcttttagccattttgctatattgtctctccatacataggatatttatggaatattagataacagtgatacatcccaccttcagaggtgctagaatgtggaaaatgtgtttattagaaatgatgaaattgacatttcatatactagaacgtgtttggtgttggtcatcttttacaccacactcagcatcagaagggttttttttttttttttttttgatagagaatctcgctctgtcgcccaggcaggaatgcagtggctcgayctcagctcactgcaacctccacctcctgggttcaagcaattctcctgtctcagcctcccaagtagctgggactacaggtgtgcgccaccacacgcggtgaatttttgtatttttagtagagatggggtttcaccatattggccaggctgatctcgaactcctgactttgtgatctgcccaccttggcctcccaaagtgctgggtttacagacgtgagccactgcgcctggccagaaggatggtacttttaaaattagtttggtgatattagacaggatgttttggattgagaaaaagggatcagccagaagacttacagtaatgcacagacatgaaataatgtctgaaatagtggtgatagtaagacagggaaagaactaaagacttcattgggtttttttgtttgtttttgttttgagacagggtctcactttgtcacccagactggagtgcagtggtgtgatctcagctcactgcaaccttcacctcccaggttcaggcgattctcccacctcagcctcctgagtagctgggactacaggtgtgcgccaccacacccggccaatttttgtattttttggtagagatgcagtttcaccacgttggccaggctggtcttgaactcctgacctcaagtgatacgcttgccttggcctcccaaagtgctgggattacaggcatgagccactgtacccggcccttcattggtttttaaaagtttaaatgtaatacatataatggcaaaaaattcaaacagtaagcaaggctacatattatagtatatatacataacagtacagagtagggatacaagaatatgtattatgataaaaaatatatgttgcatatattatatatgttaacccatgatacatcccaccttctaactttccacattctaacacctctgaaagtgggatgtatcactgttatctaatattccataaatactctacatatggagagacaatacaacaaaacagttaaaagctcagctccagagcctgtttcctcatttgtaaaaacagaataataacagtatgtacttcataggtacataggtacttgataggtatttaatgcttcttgagagcattaagagatgtatttcatggaaagtgtttaatattctgcctggcagtaaagastaaattttcttcccactccagatcttgattcctctccttagagacagcagctgttactggtttcttttatgatgtctctgttgagatattttgatagaaaaagcagtaaaaaatggaaactggcacatttctagattttattgactttcttaagaactttgacagatctgaaattttaccccatttgtaagctaacaagttaacctgcctcagtttcatggatgctggcaggaggcagcatcctgggtcagtaggcagcatgaacttcatgtcagttccctttgacattcatatctcacggtaagggaggagaccacccctcatattgtcttatgcccaatttctgcctccaaaaaaagaagaagtaaaaactaaaaggcagaaatgaaatccacaagcagatagcccggtgccacaccctgggcctggtaaagatcaacccctgacctaattggttatttatagattacagacattgtatagaaaagcactgtgaaaatccctgtcctgttctgttccattctaccccctgcttgctcaatcgatcacgaccctcccaaacagacccccttagagttgtgagcccctaaaagggacaggaattgctcacttggggagctcggttgttggagacaagagtcttgccgaagctcccggctgaataaagcccttccttctcagtgtctgaggggttttgtctgtggcttgtcctgctacaatgggagtgacatggaacagcytaggtgagtgctgtgcatcactgctaagggaccttgagcttgggaaaccctgtctgtaagaaaactcactcaacttttgccccaggagaaggtattttatacaaaaataatagaaaagatggtctkaaacaaaagctgttcagtgctgctgctcaccaaatgcacaaacctaagacccatggaaatctttctaccagcctatttcttcctccttccccactttctttaactaaaagagaaatttatgaattaatttcagtggagaagtagatggttttttaaccatcaaatacattataattttactagaaaaagtataagcattatacatatggatataaagaaaaaataattatgtgcaaatgcaagaatattggcagtatgttgtgtttgacagtaactctttgataaagtcaactaacagcacaattttttaaaaataggtgtagttttaaaatgcagttgtttggatcttttttttttttttttagttattaaatgttttatccttgtgtcagttaagcaggtgataatgctttacaggttatatagtactttcagagaaactttacttaaatctcaaaatagtccaataagaagataaccctgttttataggtacagaaattgaggcttaaaaaaaaattaagtgagttgttctaggtcagatgttagtaagtggcagaatggtaatctaaacccaaggcctcaacaactacaaaaaatctgaaagtctgtttttttcctagagtttagctactttatcctgacccttctcaatcagtagtctgtcttcaacgatttggacttcaaaccacttttagaaatatgtctgtgaactcatgtgcgtatccagagctttacaagtcagcaagagaatgcctcagaatagattttccaatatgtagcaacataagcctaaagaataattttcaagattatctctatatttttattttaagtaaaagtacatgacagatcctggattaatgagaaagggatcaaatattaatccaaaatggaagctattttaatttagacatttggtggtatttaatttgatatacaaggaggttagaaggagaaataggttttacaatagagataagtttttcttatacctgctgagtgttttattttaagtaggatttttttggccagttaatccatgctaataggaaatttggaaaatagagaaaaatataaaaaatgtaaaataagagtcccttatttcattaacatcgtaataagagataagcacttttaattatttatggccttctagtcttttaatcagtgtctgtatttaatgtaattgggatgataatttatgcatttttgttttttttgttttgtttaaccctgattccagtttctacatgattatttttacgacatatttttgttagctacataacgttctagtgtcagaattattagtatttagttaaaacctgctcagattgggtttttaggttgtgtttttgctgcaataaacataataggaacaacatgttttcatgtaaagctttatcctcattttgtactgcaggaaaaatacctaggttagaattactaaattaaaaaatggacacttggggccaggcgcagtggcttacgcctgtaattccaccactttggggagctgaggcgggcagatcacttgacatcgagagttcaagaccagcctgaccaacatggagaaaccccgtctctactaaaaatacaaaaaattatccagacgtagtggcacatgcctgtaatctcagctacttgggaggctgaggtaggagaatcgcttgaacccgggaggcagaggttgtggtgagccgagatcatgccattgaactccagcctgggcaacaagagcgaaactccgtctccaaaaaaaaaaaaagacacttatttaggctttccatatatcatggtaatttgctttctaaaaggctatatgaatttttaagtgtgcttgtttctctatatgctcaacagaatggaatgctatcttaaaagaaaaaagatacttggtagtttgataactagtaatgttattttaagttgtatgtttttagttactagtaagcagtttgaattctgtgaaactttygttcatgatctttactcattttttaagtgcatttatgatctcttcaggctattagcctcttgtcatcaaatgtgtgtaagatttaagactcatcactgtcaagttaatggatgagttctcagaggcaaaggctttatagagaaaagaagataggagtgtgaactgagccctgaggacagcctgcaaggagtggataaaaagccaataaacagaaaatgttrgtgttcagaaattaggagaagactgaatactttccctactcttaaaattaatccttcttttattataagtatacagtcttttctctcagaatttagttaagtaactcactgatgttactcaaaaattgttactcgattaaaaaaattttctgagctaagatgacagtgactgtcttctaaattttagtttcagttaatttttcaaaacaaaaccaacacaatcaaagcccccttgtgcacctctgactgtatccctccctgccttccaattatcctgaaattgatatttatcactcccatcttttgtacgtgtgtctcacatcctgtaccttagtcttttcttgttaattaaagcagatgttccatgtaaacttatttattaatatttcttcaactgaaatatcatttggacctagggtaaagttaaatatactattgtgttatattactccgtttactttcttctatgtttgcctttgaattgtccaactctttgctagttccatgcttggtttaacccagccagtgttctgccgtctgtggttagtagaactcagaaattggaggaatccagaacagtagttgaaatacttgggggcgggggacagggtaggagtggagggtaggagcaagagggcaaagagaaatgaaatgcagctgagagaataatcagattccttccaaagcaactgaacattgtcagtccgcatagcatcataaatagctttctgaaactacttttttttttttttttgagacggagccttgctctgctgctcaggctggagtgcggtggcgcgatctcggctcactgcaacctctgcctcccaggttcaggcgattctcctgcctaagcctcccgagtagctgggactaccagcgtgcgccaccacgcccagctaatttttgtgttcttagtagagatggggttttaccatgttggccaggatggtctcgatctcttgacctcgtgatctccttgccttagcstcccaaagtgctgggattacaggcatgaaccaccacacccggccagaaactactttttacggctggagtttcagaactaatttagtaaaggattgaaaaggaaggaggatacagttgactcatttgtacagagtatatgactcatttgtacagaatgaaaacatgtttatgaaggttcacactaagtgaaagctggcatccaagttgattcagacaaaagtgaaagtcaagaagttaatagtacattaattctccaaatgcatgccagcagagygtggcaggaaggtacacaagtcagcagatctgggttgtcctggttctcctattgactcgtgtgtgtgatgttaggtgggtgaatcttggctttgaatctccatttgtaaaataactctcctgaaatagagatggatagggtagaataccatatttcttaagatcttttataagttgattccattgttgtaaattatgaatcctaaagtatttctttatgaaaaattttttaaggctatgatttactaaactttcttaaaattttaaattttagggaagacatgtaaggaatttgcataagacagytatgcaaaatggagctggaggagctttatttgtggtaagtaattacttagatttctttggaaagaaaagacttggaaattggggtaaatccattgtaaaaatccaaaatatcttaaataccattgtctttgatatatgatggtcatcgtgagaatttacatacagctaattgaatttactacatttcaaaagatgttggttccagttgaacctcatgagtttaaattagtatcaggaaaactctgggaataagaatttatttccagtgaaattactgtgtgagccctaacctgattctcatcacactttgggttctcagtcatgttggcttactgagagtttggagattgtaacttgttgaatcccaaaatgacactagtttgaaactcatggattttagtaatgtagtaactagattagcagctggtctttatatttttagtttccggagttttaactataaatagaagtctgtgaactccccagattagttgcacaatttggaaaggataagatattatatctcccttttctgacaaggtgctgttttcagggattaatctagtataaaggcaatatagtggacttgtgtgatgatttagagttagtggtgtaagaagtagcttcctgctatatatcaagcatcaaattggccacatatttgagatcattgtccagagtgtctgttttctttcctcttttggcttatgtcctttaaaaagcagaactccgagagttaacatatcaagagattcatttctgtattcaccacacatacataacattaattgatcgtaagtgttaatctcagtgtgactcatttgatttcctgttgacatgccatttcttgtcagtttttgaagagggcctgcttctgctcttttaagaagagataaagcttcttgctgttggctattatggaaaacgtgggaaagagatggtgctgtttttttttttttttttttttttttttaagatggtccttttgtaccctcctaaagtaatgggtcttaacccttttggatcccagatccctttgacaatctgataaccttgcttttgggaaaatacacatatgttcacatttaaaattttgtgttttaatttcataaaggcttccaataattggtaatgttttggtaattctatcagaagatcttactctctaakgaagctggataacactttttgttgtttgggtttttttggtcctaaaggtacttctcttattctttaaatggtcctttgtaaatttttaaattctgctaactttactttggtaatcatactyatcaaatgtgtgtttagacattctttttgatggaaggatagggtggtatatatcatgttggaattaaaatggagagattaaacaataagtaatagtatagtaatgtacagtgtcattcacacttgagagaatttggataagtctgaaaaactgtttttgttgtgtagcacagagatactcctgagaataaccctgatactccatttgatttcacaccagaaaactataaggtatggctaaattaacattataattaatttaccaaataggtaatattttctagatgtataaaatgatgttctttcttttatacagaggatagaggcaattgtwaaaaactatccagaaggccataaagcagcagctgttcttccagtcctggatttagcccaaaggcagaatgggtggttgcccatctctgctatgaacaaggtactggattcatttttgccttagttctaaaagagaagagattgtgtatgataatttccttttatagaaattactctgatcatctccagtgtcagaatctaggattttggagccctttagccatttgtatgtttccttgaattgtctttgtgtttttgttcattcccttaatgcatagaggtgatttctaaccttgcaggaaataaggaaggcattatggtgaaagagggtatgtgtttttttttttccttttgaaggaaatggtcaaagataaaagattccaaatgtgtataacttagtgtcaagatattctgaaaattaatgtaatatttaaacactagaattacagaaaagaagatctgctcactagtatgaaaatttttaatattttacatctttggctgtaggctgtaagaaaaatctgtataataggtgatatttatacaatttgattatgctactttggaatcaacgacctatagaaatgctatggatgacccattttattcaaagttactctattcatataatattcatttttcctaatagttttgagcagtaatacaaatttcaagtttattcgtatcctgttaatacaaataactacatttgtgtggtgatgtattacagcatatcatttataaagtgccatacacaaaccacatactatttgattmtgatgagaatcacataaccattaagctgtgttatataatggaaaatatttttgacttagaactaagacacctgatttttctctgaacttcctcattggcaatgaaagttttgaaccaggtagacctcttctaattattaagttatgatttctgagcggtagtgctaggactgaattcatttctaaatcagtgcattttctacttgactgactataacagagattttgttgtacttcattcttaccactttctaaacttaatttggttataactcttaggctagacaatcatctttctgagagaataggaatgtcctcaatttatctaatagaatcctaaatgcaaattttagatttagtttattgatattttattttatttgcattgtatagtactataacactggtattttttccctatgaaaaatattataaagcaagtttagtgagttactatcctgagtaaacataggtggttatttcttcgataaattatgtatttcttgggaagttacttaacatttttttaaattaaaatagccaactttataatgatttaggtatatgtttctaattataatgttattattttgaaaaaatcatatttttagtaatggtaagcctgttggaaatcttgctgagtggcacgttagcagagcaaaataaaaataaataagaaactgaaagtgaaaacatttaaaaaataagacaggcatggtggtgcatgcctgtagacccaggtactcaggatgttgatgtgggaggattgcttgagcttaagaccagcctgggcaagatggtgagaccctatctcttaaaaaatatgtatttatatattgtcctattatatttagggttggatttgtgtgggggaaaggcaggaagtgtagggtatagggaatagactcaagattctttgcactttacatttgggacttttattttaatgttactgcccctccccccaacccatgaaacacctaaccttacaacaaaaaatatccagaagcttaataattatttatttaaccgtcactaaggtgtagggagatgtgcagaattccaggaaggagtcttttcctaattagacagtcagagcctcattccagatttattattcctttggtagggttccagcatgtatattttgatagagagctccccagattcagggatacgtccttgattcagaactgccgaatgaaatagcacaattactttatctgtcacaagtgagccatgattagatgtcttttgagaatatatttcctttagaattcctaatatgagaaagttaacatacttgtctgaaatgcccgctcttcttttatattagaatatggatatatctataatttttaagawtgccagatagtaagtcttaatgataataggtcacctagaaagttgtagacagaattataaatcacgatagacaaggaccagccctggcaaacagctagaaatcctcgttttccctaacagacttgccctaagaaaagatgctgagttagtgatccccttagtcctgaacaccagaatgtcaaaacaattgttttctattaatgtcttgacgtgaagggttagaaagtactagactatatgattcaactttcaaaagagtattgtgatatgaaatagaagtagtgtgctggattctgggagaggagtgtgtgattgtgtatgataatatgtgtatacatatatgtagagatataaaattttgagtttacatatttaaaatatgggccaatagtgagctttgattttcaacctttttttctgttgctgtaccatttgtatgtaggctgtttggaaaaaattggtgagagtttaaaaaatctaattgcttcttttattggggtttggccatcaattttttgccatttagacagattataaaatgtgagttgacatgatcaaagtagaaattcttaatagtgaaatacttaaagatttagagaaaaagaatatccttttacagaggtgagaagtagggtagaaggaggaagtgctgttaactccattaactttcgggctctgtatggtttaagtgtaagtacattgtctgcaaaaattgaagagtttatatctcccagttatccaagacaagtatgttttctgctcttgaagaacttttctgtttttaccaaattgagacaatattgaaattatactttgtacaacataattaaagctccattactaacactgtaattatcttatttttaaatgtcctaatattttaggttgcagaagttttacaagtacctccaatgagagtatatgaagtagcaactttttatacaatgtataatcgaaagccagttggaaagtatcacattcaggtctgcactactacaccctgcatgcttcgaaactctgacagcatactggaggccattcagaaaaagcttggtagggaatacatgatatttgtaacactgataaaaagtagaattgtctctctagatttggtacatttctatctaaaatttccaacttctgccatcttattggatctgtacttacctagtaatattttgtgttactgtgtttccacatctttatttcttcctatttggtattcttcctcagttcttagtgttaaagctgagtttttaattttttcttttttaatcagtatgtttgaaatgcttgtagaagttataaaatattcgttgtttagaagattgtttcacttagaaaattgtttcacttactattctatgacagcatgtggtatattaaaaagtgacccattattgtctttatattcttctaaagaagtcatggaacaaataagatacaagcatagtaagaatgctttgggaagggaaatttgaaacagatgttattacagtagcatttgaaaagtaaattagcattttaaaagtaaatgggcattttcccctacaaaactgccattgctacacttctaactatatatgtcaaatgaagtaatattttgttattgaatataatatgtgcatgttgtaaaaatagctgggtggtattgaaatatataaaacagctgaagttggctcaaacccccccacccccaacaccatcaaggtataaatcctgataacaattggatatattagttgtagattttatatcattttaattattaaatatataaatgtactacatgtatgcttgctttttagactttattttggctgtatttctacagcacaatatatatgtctgcctcatttttttttyctgtttttttgagttgaggtctcactttgtcaccaggctggaatgcagtggctggatcatggctcactgcagcctccaattcctgggctcaagtgatcttctgcctcacccttccaagtagctgtagctatgggtgcatrctgccaagcccagctaattgatttttgtttgtttttgtagagaggggtcttgctatgttgcccaggctggtggttgtgaaatcctggcctcaagcaatcctcctaccttggcctcccaagtgctgggatcacaggtgtgagccaccatgcttggcctgcctcatttttcttttacaaacagttactttgatgtacacacacatctttgcgtacttgtcctgttgtatrctgagatagtttacaagaagtagaattgtagggtcagactttaccgtatttttcccaaatgccttccctaaatgtatgagactayccattttcttcacatcccttgataatctttgacgttaggagttttctgagtctttgccaaatctgataatgtgactgtgattttagtagtttaattattacaatcaaaatgaaaataatacagcctgatgcactgctgtataacagtaaacactggtgataagtcctctgaaatttgattgcttttaaaggaacaagtccactaaaaacttccttgaatgttaaaattacatagagttttttttttgttttttttttttgagagagtcttgctctgtcacccaggctggagtacagtagcacaatcatgactactgtaaaaaatttttactactgtaaaaaaatttttaatttttttgtagagctgtgtctccctatgttgcccagactggtctcaaattcctgggctcaagccatcctcgcaccacggcctcccaaggtgctgggattataggacggagccactccacctggcctaggatttttttctttttaaaaaacttttttttttttttttttggagatggagtcttgctctgttgcccaggctggagtgcagtggcgcaatctcggctcactgcaagctccgcctcctgggttcacgccactctcctgcctcagcctcccgagtaggtggcactacaggtgcccgccaccacacctggctaattttttgtatttttagtagagacggggtttcaccatgttagccaggatggtctagatctcctgacctcgtgatctgcccaccccagcctcccaaagtgctgggattacaggcgtgagccaccgcgcctggcctctttttaaaaaacttaatagtcttaaacttttaatatacctctataaaaattctttttttttttttaaaccaaatgactattaaaatataacctggtccttagagtgtttatttgtatttttaggaataaaggttggggagactacacctgacaaacttttcactcttatagaagtggaatgtttaggggcctgtgtgaacgcaccaatggttcaaataaatgacaattactatgtgagtatttcaggtaatacaagttaaagttgtatgatgtcatatttaaaacattttaaatatttgattttgtgtccttagatgttggtttctgaattactcatttagaagaaatggttaccataaatatccaggttttaaaaaattctttaaacatttttgcatttaacttcagaagacaaattttaaaactttagattatgaaaaatttaataatttggatattaatacagaaaataatcctagtgtagccaactatcaggacttaactgagagtaatattttgccacattttacttcagatactatcatcatcatcatcatttgtagaaataagctacagatacaggtgaaatactccatcccaaatctttttctcttccttttatccccagagataaccattatcataaattgtgtctatatatgtatgcagctatactaatatgttgtatggctttttaaaaaaattttatagagatggtatcatacctctaagtactgcagctggatctcacaagttttgcagtcttttttgtttttgattgagcgtttstgttttttttttgtttttcattttgatttctttgacctgtaagtttctaaaaatgttcttaatatccatatatatggcgttttctagttatttctttaaaaattgcttgctaccctaattatatcaccgttttcattcaagataccttgttagctcatatttcttagaaatttgtttatggaaattttggagggactgtacttaaggtagattttcttttaagaagggatttgctttgtttctctcctgctcctggcagtactgctggccccagaaaagcccctctccttataccctaggcctctgttyctccsgtgtgaaaggttccagactagcagttttctttgagggacagtttactcttataatgaggttaaagcttttggggaccttaactttgtgtagcttacatggtctcttgttagactctctggggctggctgggtcccttgcccctctaagctttgaaactctgaagcaaagtttgcttgatgttccactttctttctttggttttccttgagaatttggcgtctgggtacttatttcttgatttaaataggaattagacagtcaaggctttgtgtgaagcattgttaagtctaaatatagtagcctgtagatgggtttgtttgagataggtattctttcagttagcagtagttagatctttagggatagatactaggcatctacttaacaagttactacagctactttgtaccttactgtttcttcagtaatacagcatttatttagtatgtacgttgacactgttctactttatatattttctcattaatcctcaaaaacgtgctgaattaggtttacaaataaacaaacaaacttggggaggctgggtaacttgtccaagattactagctagtaagtgatagagccagaactcaaatgcaaatatgtttcaattcagagcaatattctgtattgcctcttcagctgcaggctcttgttgcatattatatttagcagtgtgtactatatataggagttacttaattgttgatgccttggtaactatcttgtgagctgagacagacaataaaatcactggcattagggatttacagatttcagccgtagaaagtaattttgtgccatgcgtggtggttcatacctgtaatcccagcactttgggaggctgaggtaggaggattgcttaagcccaggagttggagaccagcctgggcaacatagtgagaccttgtctctataaatatatcgatataaaagaaagtaatttaaatatgactattgttaattttttttccaggaggatttgacagctaaggatattgaagaaattattgatgagctcaaggctggcaaaatcccaaaaccagggccaaggtatgctttatttatatataggaagttttagtggctcacctaaattaatctttcagataaacttgatttaaaaaattttataccttaagttcataggaattggtaggagctttggatagtattatctatatgaatctcatctagagcaagaataattttttttctaaaaccctgtctgataatcatccgatacctgaatatttatagagaaggaaattttactacaaatagaaatctattccattatttaaaagttcatactgatagaagattgacccaaagaccatctccctctaatttctacctaaaaatccaattctgccctttgaatcaacaaaagataattttagtacctcttccaaatgacagctcttcaattacttgaaatagctaccctgtcttccccttatctttttctcagatggaatatccacaattgtttcattgtttttctcatatgacatagctttggtctccctctgtgggttttctagttggctagtgactatttaatgctttaatgtgatgcttaaactaatcatggttttttgtcttttttatttatttatattttgagacggagtctcactccgtcacccagtctggagtacagtggcgcagtggcacaatctcagctcagtgcaagctccacctcccaggtagaagtgattcccctgtctcagcctcccgagtagctgggattacaggtgccagccaccacgcccggctaattttttgtatttttagtagtgacggggtttcactgtattagccaggatggtctccgatctcctgacctcgtgatctgcccgcttcagactcccaaagtgctgggattacaggcatgagccactgtgcccggcctaatcatggtattttgagatacatacygagcagcacagagcattgtgggactgcctcctttgttccagacattatgcttgtaataattgtgcctaattatatcaactcctacttcagagacattacacaattaactgcacttcataatacctagatctttttctgttcactatttatccaggttgctcccgtcccatacctgtgttacattaattactttcctttcagttatgaacttggattttcacttttaaacaaacccttattccatgtatgtgttcaatcactcaaaattctctcttaatactagcaaatgttctcatggttttagtcataatccctcaaattttttgtttatgtatataaattttttcttccctcagcacatttggagtttttgatgtccatacggtattctaatgttttaaaacagctgtgatgtgctcttactcccgttttaaaatatttttcttaagctttattataaataacaattccctgaagtagaattactaagagggtatgagtggttctagagtttgctctctaaaactactaataataccctacttaatgagaaaatgaggtcagttcaggataacttaagtttagtaaatgctagctggcccctgttgaccattactttcttttctaagaaacgtatactgttcttaacaacctgarcctatagaattgaatttgcttaaagagtgttggcattttcttcctaattcctcactttcttgggtatacccctttttttaggaggtaaatcatttccctggtgaaaaatcattctcctttatggaggcaactgaagtaaaacctttagtcatctatcattacagtatctttcttagctagtgctcctatcccttacttattcttgctttaaatagacactgtccccccaaaaagtacaaatttcataatattttccacaagcttcatctgctttttaggattcaggtattttaaaataaattcatgctattcttaggtttgtacttcagcccataacttctttcaccttttgggtactctaaagaatatctcaagtgcagatttccttgtgaaatccacttgggttctttagatggcccctctcttctgattagatgttttgaattctatagtcataactttggtgttgggcttcctcccccccactcctcccctcacccgagatggagtcttgctctgtcacttaggctatagtgcagtggtgtgatctcgactcactgcaacttctgcctcccaggctcaagcgattctcctgcctcagtctcccgagcagctgggactataagaacgtgccaccaccatgcccagctaatttttgtatttttagtagagacggggttttaccatgttggccagggtggtctcgaactcctgacctcaagtgatctgcctgccttggcctcccaaagtgctgggattacaggcttgagccaccacgcccggccactttggcgtttagaatcttctgctttgcttcttgtgaactgtgggatctatggttcatattaatctagtattactctcctgccacacaaattgatacctgctttgtctactttgttatgtcacattacattaaatactcaacagtaatttttttcacaaatttttttgagtgcctgctgtgtgtcaggcattattttaggttatgaatacaattatgaacaagataaagttctcatatatcttctagtgatggagacagatgactagtgtaatatgtgagtgataaaaaggctacacaataaaatgtagcaggtgttaggggatagatagggagtaaatttagtgaggagaggccgcttagaggtggtaacatttgagccatgacctgaatgaagagctagagggaaccatgtaaagagctgaaggaacaatgttccagggaggggaaagaggatgtatcagggtcctggaagaaaagtaaggtaacagtatggctgcagtgaggtgctcaagcaagaaagcagtggaaggggtcagaggagataagggcccagataagtaatctgggctgaatcttaaatataataaaaactgttggaatgttttcagtagggaatgraatgagcaatcttaaaatactgccatagttgctatgtggagattagaatttagtagatatgtgggactaaggatttatgagtgattttcagctttttggcttgagcatctctgaggttcctttaccgaaaatagagaagatttgtggtagggcaagtttggggaagaaaagtcaaattttgttttagacatagtaagtttgagatgcctgttaagacatccatggtatgatgctgataggtagatacgaacctggaatatagggaataggttagggctggaaacacaaattggggattcatcagttactaagggtagtatttaaagttataaatctggatgacattatcggggtgaaattaaaatctgttatttgtaatatgaggtactataacattgtattttaacaataagcaggaactaagtactcagttaagcattttcaacaacatctgataataatagggatgttacttatcagtaatcatgaatagtttttcgctgagattttcttgacagtgttctggatttgagccaaatacttcaaaattattcgtgtccgaatctctttttttacttactacctcttatttaaaaagcagacaaaagtctacttaggtttcaataattgcaagcatccaccaatgctgtattatataaagcttgtatttggacatagcaatactagaatgtcttgtcagcatatgaaaacaagaacttttcactttacttacccaatatcttggatatataggataatgacagagactgggatagcaataaccataatatagttatagttattctaaattaaccaaagctgtctaattcttttttattggtattttaataataaatatctctgctctttgaaagaggtactaattgtgcgtctctgtaatgaaaaaccgagaggaattaaactggttcaatagtaactgattcctgagtaccactgccaggtcttaccctggccaaaattagtaaaagactgatgtctatatgtggttcaaaactgcttttgtattatcgttggtgaatgaccactgaaaatattaaagcagtggtaagataatacagttgactcttgaacaccatgggcgttagggacattgattrctcatgcagttgaagatctgtgtgtaacttttgactcctccaaaactttactcatagcctgcagttgtctgaaggccttaacaaataacatagtcagcacatattttgcatgttgtctgtattatatactgactgtattcttaccataatctagagaaaagaaaatgttattaaaatcataatgaaaatatatttactcttcattaagtggatcatagtacaagtcttatcattttcatgttgtataggctgaggaagaggaggggttggccttgctgtctcagaggtggcagaggctgaagaaaatccatgtacaagtgaacccatgcagttcaaacctgtgttgttcagggtcagctgtagtctcttaatcttgacattactaaatatttttgtgctgagattgttcttattttcagtgaatttaaagtactgaaaaattctaaacttgttttcaggttactaataggtagaaattttttagtatggattagtttataactcattttaaatccaactttaattcttcatatttagagctaggctacagttccaatgcggttggtagatgactctagacaataacatcacttttggttttttatactaaaagtagggacagtgctggatatatctcagcaatagtaaaaagcactaaacttttataaagtaatttgtctatgtaaagtactttaagccatgaaagtttacagaaaggccaagttttctagaaagcaaataagttaaaatggtacacatacgtatagtgttggaatgactgacgaaccatactttttaaattttagtgaagatgtaattattagatggcattttaagcatgagatatcaggaaaatcattttttgtttagttaagtgaaaaacactagtgtaaattgtggctgtcaggtgagtggatagggctagctcactgcctcttgagtgttctgaggcatgtttacagatgaaagggggggttacatttttagtagattaaacaaaattataggctttattggaggatttttgtagcctttgtagtattttaaggtacactgtgtgaatggcgaggaagggaggtttacagccagacatactggatcactgggactcccgtttttctatacaatgccatgggattgtaattttatggaacaaactttaggaaactctagaccagattatttttaaaattacttccatatataaaattctataatcctgtgaagaactcaggaagtacttacgattaattctcccatttattgttccggaaacttcagtttttataatcttcctaaattgatcctttatgttgataaacagtgtcgatattaaggagctcattaattttggaagatccatatctatccaaactggtaagaggctttaagatamcaaatgctcagctttcaggagacgtctaaaatgaaacttttaaatcatattccattctgatatttgatcaagagaaaagttttaggcagaaaagaagaggtagctgagcttaaaccgtaagaagaaacctagtaaaggtgaagaaagtttctccaaaataatttcattgacatttaaagagcagcagtggtgcctatcaataggcaacataaaaaattacaggccgggcacagtggctcacctgtaatcccagcactttgggaggttgaggcggacagattgtttgagcccacaaattcaagaccagccagggcaacatggtgaggtcttgtctctaygaaaaatacaaaaattagccaggcatggtgacgcacacctgtagtcccagctacgtgggaggctgaggtgacagaagcacctgagcctgggaggttaagactgcagtgagccattattgcatcactgcatcccagcctgggtgacaaagtgggaccctgtctcaaaaataataaataaatttaaaaattgcaaaatataatactgttgtcttttttttaaagttaagtatcattttgctgcttactctacaagtttcaggctcttacagtatacaatgactgcttttttatctgtttttgtagtgaacaagacctataatccaaagatattaactaagttctgactttgtagataattgttcattacttagtaacttgtattatatgctgtgacatcttgaaagatcttatattatgtggtgtcactttcctggctccaataaaaaatgattccctagggctctaaagaacagacttaaaggattgatgacacaatgtgaagggcaaagccagagggggttgaaaagatataaactgaacaagttctttctttaggtaaatctgtggcaggaacaggtaaattagcaaagccagggaatagtggtggaggggtgacatacagtaagtctgagctgggctctagaaacagaggtcagacagggcagaggtgagcaattacctgggaaagcgtgtgtggggttgacagacaggttcttctccctctatgctgcctgtcttcataaattgctccatcaggacttgttcttgtttgcttccttttgtggctgctatggccatcctggtttggaaacttttttcagaaaattactactactaatatagtctttataatacataaatacaaactgattttgacttcgctgcttctaagggacattgtcccaaatcatatttcctcaaggaatccagtttctatttccaaatacaatgtataagtgtgtgtattccctctattcactgtgactgtggatcttgatctaaataaaattcaactctaaaaagaaatacagtgctctagtttattaaaacatggtttttaaaaatgttctctggggttgggtatttttgccgtagttctttgctttgattcttgggtagatgctgaatctcccaaatttggtttctctaactgtaaaataaagccagtatcacttgtcttgtggcatcgtaaggattcaatgagctagtgtatgcatactgctcagtaaataggaactattattagggctacttttgtattttttatgtttatggtgaagtctgatgtttttccatatttaaatttaggaagagaaaatcttgcatcagttgaaatgtttgaattaaataatctatgctagttcttagggtaaaaatagttacttaactgggctcttgtgaggtaaccattacaatttaagtaaaaatttacaaatgttaatcattaatagtttaatattacttttcatttcaggagtggacgcttctcttgtgagccagctggaggtcttacctctttgactgaaccacccaagggacctggatttggtgtacaagcaggcctttaatttatattgaactgtaaatatgtcactagagaaataaaatatggacttccaatctacgtaaacttatttgtttattstgctctgtgtacatcctcatgctaaccgtagcaacttgcagctctaagtattatgtcataatgacagaggaccattttaaagtsttctatctatggctgtgaagacatcattatataatctagttaacagttactctagtgtcacccattttcaatttccagatcgcttttatcaagatcaggttactgkgaagtaaaaatttggttaaattacaaatgttttgctttcccatctttagccacagccaagttttaagttaacatgatctttctataaactttgtcagtgctccctttaaacattatttaaaacacataattgttactgtatttccaactggtaagacctcaagcacactgtaggtttaaggaggatatggtagttgtctctagaagccttttttttttttttttttttttgagacggagtctcgctgtctcccaagctggagtgcagtggtgggatctcggctcactgcaagcattacaggcgtgagccaccacgcccggcttaagcattaccatttttaaaaaagaaaggtccaaaacacttgacattatccttagctattctgacactgcaagtatacaaaaaataattgggtgaagggattggaagtatgattatgtactctgcagtggtatggatattacaacttagaaaaaaggataaacccttttgtgtatttaagaaattagctgtagtacattagttttgcattagccagctttaatgcatgaataatttatattaatctaatcctcgatttctcaaagtcacctgtacttgaaacagactattcactagtaattatgctttttttttttgagacaggctgtgtccccaggctggagtgcagtggtgtgatcttggttcactgcaataccctggcctcagcctcctgagcagctgggagcacaggcaggcgccaccagcctggttaattttcatatatttttttagagacagggtcttactatgttgcctggctggtctcaaactcctgggctcaagccatctgcccgcctgagcctcccaaattgctgggattacaggcgtgagccactgcgctcggctataacgattatttttaagtatgtctttaagattttttttttaattgagagaaggtaaacaacagttaattttccaagtggcacaaaaaagtaacaatgaaaatgtcctaccctggagctctcctgactttctcataggcgactgtttttttctttgtatttcacatcataaataaccaagttaaatgtaacactattccacctctagccataaggtgctctttttctagtcttgttgaccctaaagatttgtaggtgggagaaatcaggaacccaggaaaggaaaaactcctgatctttaatgcaggtttatgctttacatagtaatttgatgggacctcgccgtccctgtcaggtctgaatgtcacttcatctgctgtgatcacacctgaaccctcagttcatcaagacgttaaaggacagtgtaacataaacttgtaactgcatgcactaagtcataaacagacgctgttgttgcagattaacctctacgtaaataacgcgcccagaagggagtgagtacacgctgctgccacgctgcgacggtcaattttcctccggcacccttcctagtacctgagcagctccctctcaaatccccaacactacgtgtgggagggtgcactgaattcctctttaaaaaggccactggaaggcgtggctgggaggggacgcgctctagaccccctggtgccagggcaggtgcacgctaccgcgctttccgggcggggcccagggccccacctgaggcggggggccgcgggctctgggcgtaggtgcagcttctccggcctggtgctgggccagacggccgccgccggcttagcgggggaacttcgcctagtcctcgggctgcggtcgcagcgtcattttgcctgagttggatcacgctcgtccacccaccccggtgtaaaaataacaggtgaataccctatgtgggggtcctcatcgccgccatttccagaagcttccagtcacagccactgccacggtcgccacaaatgctactgcagagcccgcttgcccagcagcgtcaccggcgcctgccctgcnnnnnnnnnnnnnnnnnnnnnnnnnnnnnnnnnnnnnnnnnnnnnnnnnnnnnnnnnnnnnnnnnnnnnnnnnnnnnnnnnnnnnnnnnnnnnnnnnnnnnnnnnnnnnnnnnnnnnnnnnnnnnnnnnnnnnnnnnnnnnnnnnnnnnnnnnnnnnnnnnnnnnnnnnnnnnnnnnnnnnnnnnnnnnnnnnnnnnnnnnnnnnnnnnnnnnnnnnnnnnnnnnnnnnnnnnnnnnnnnnnnnnnnnnnnnnnnnnnnnnnnnnnnnnnnnnnnnnnnnnnnnnnnnnnnnnnnnnnnnnnnnnnnnnnnnnnnnnnnnnnnnnnnnnnnnnnnnnnnnnnnnnnnnnnnnnnnnnnnnnnnnnnnnnnnnnnnnnnnnnnnnnnnnnnnnnnnnnnnnnnnnnnnnnnnnnnnnnnnnnnnnnnnnnnnnnnnnnnnnnnnnnnnnnnnnnnnnnnnnnnnnnnnnnnnnnnnnnnnnnnnnnnnnnnnnnnnnnnnnnnnnnnnnnnnnnnnnnnnnnnnnnnnnnnnnnnnnnnnnnnnnnnnnnnnnnnnnnnnnnnnnnnnnnnnnnnnnnnnnnnnnnnnnnnnnnnnnnnnnnnnnnnnnnnnnnnnnnnnnnnnnnnnnnnnnnnnnnnnnnnnnnnnnnnnnnnnnnnnnnnnnnnnnnnnnnnnnnnnnnnnnnnnnnnnnnnnnnnnnnnnnnnnnnnnnnnnnnnnnnnnnnnnnnnnnnnnnnnnnnnnnnnnnnnnnnnnnnnnnnnnnnnnnnnnnnnnnnnnnnnnnnnnnnnnnnnnnnnnnnnnnnnnnnnnnnnnnnnnnnnnnnnnnnnnnnnnnnnnnnnnnnnnnnnnnnnnnnnnnnnnnnnnnnnnnnnnnnnnnnnnnnnnnnnnnnnnnnnnnnnnnnnnnnnnnnnnnnnnnnnnnnnnnnnnnnnnnnnnnnnnnnnnnnnnnnnnnnnnnnnnnnnnnnnnnnnnnnnnnnnnnnnnnnnnnnnnnnnnnnnnnnnnnnnnnnnnnnnnnnnnnnnnnnnnnnnnnnnnnnnnnnnnnnnnnnnnnnnnnnnnnnnnnnnnnnnnnnnnnnnnnnnnnnnnnnnnnnnnnnnnnnnnnnnnnnnnnnnnnnnnnnnnnnnnnnnnnnnnnnnnnnnnnnnnnnnnnnnnnnnnnnnnnnnnnnnnnnnnnnnnnnnnnnnnnnnnnnnnnnnnnnnnnnnnnnnnnnnnnnnnnnnnnnnnnnngtaagacgctgtctgggataggaagttactgttgcactcgttgaaaccttaggaaacatttaaagcagtgtagtcaccgggattgtaatttccactggacacccgtggttaaactgcgaactaaggtgaagtgtgttgcagatccagtgctgtgtatgtaatggttcggaattacctctaatcctaaagttgaaatgagcctgcatctgcagtcatgtatttcgttttcattttagaatggtttatgtaaattataaagaaaggctagtgaaatagctattttatcgtaaattaactgtgtattaaaaacatatgcacagccgggcgcggtggcgcatgcctataatcccagcactttgggaggccgacgtgggtagatcacctgaggtcaggagttcgagaccagcctgaccaatatagtgaaacccccgtctctactaaatatacaaaattagccagccgtggtggcgcatgtctgtaatcccagctacttgggaagccgaggcaggggaatcgcttgaacccgggcggcagaggttgcagtgagccgagatcgtgccactgcactccagcctgggccacaagagcgaaactccgtcgcaaaaacataccaaaacaaacaaacaaacaaacaaaaaaacatatgctcaagtaggccgttaaaaatcttgggcactgatctgagtttctttaatcgttatacaaagcctttcctggagattagctcagaactggcagaacatatgctctattggtgccaagtggcttaaaagcaaaatgaggatagtgtccaccgtgtaagatgaagtcgttatattaacagtcttgttgagaaaaatctttaatttgggttaaaagcaggagcctttaaaaatttgaaatgtttacccctggagattatagacaaggggagaaaagttttactacttaaggatcttttatatttgatacaggcactgaataaatttctgaagctctacaggcatcttggctaaggtcaagtttaactcgttatgtgttttagagacagatgaggtgttaaaatggaaggaaaatgagtgttaagtgtacttatgtaggatacttttaatgttcttaatcttgtatagttttcataatctcataattttcatagtagttggtaagaattagttatcggaatagttttatgaactacgcagaactgggaaagtggaaatctctgggtgtgtattccatgaagaatatttgaggaggagtgaagagaacaaaaatattcagacgaggaaagaatttagctgaaaatacattgtgcagacttacactggtttgttaatacccaagggggaaaaaagcctgaattttatttgcagactagtgtccagctggtagaatgagtttaaaaggaagatgcttttatcaagctgtcgatattactttttcccctatagaagttgaaaaccatgactgatactcttttgaagtagattggagaaatggtaggatatttggaaaacacttcgttggagaagagatttttattcttaaaaaaaaataagtgatttttaaaatatcattttgatttcttgctattagctgacacgtaaacttttctttaaaccattcttacgttttaggagcattatttcagtccaaaaagaggatggttaatgcaatcatttccatcatagttcataagaggtttctactgctctctgtatatagacttagttatgttaaagtaacgtgtatcagatgggcgtgaagaatttgtctaataattgctgtaggttgcttaagagctattgacactgctttctgacttggaatttgttgctaaaaacatgtatttgtaagatgcctgtgccttgtaaagggtgcagtgttgagatttatccttgggacaggaagggacctctgattttctttattcatttcctttatttttacacatgagaaaataaggtgaaaagacttaaagctagtctgcagctagttaaaaactagtctgtggtttggccgagaggtttctttctgtgaagatgctaatttgcctctttctttagaagttttacggagttgtggaaagaacattgaaatataagtgagaaggcctgggtttaaattcttgatttatcacttcctcacttcctaacagtggtttttgacatatcgcattaactttcagaaccttgccttctatcagctgcaactttaaaaatacaaaaataatagccttgtcttcttaacctgcaaaagtaattttcctgcataatttaatgttttcatgtggaacaaatgagaatgctttagaaagcacattgtacactgtaaacttctatacaacgtggtgatgttatttttaaagaaaatacaattcttaaagtgtaacaaggtgtttagatccctggatttttgcgtagccctacctttattgttttcatcttctgctgttttacagataactcctgtagatacattttctgatccccacttagttctaaccttagttaagctgcttatgaacattttaaatattgcagttattagtctgactttccctggagaatatgaagtttctttagcctttgaaaatattctcatgtatactcatgcattcataatctgtttctgtaacagacagtggctttttaaaagtaatagtgaaagtaatcttagtagcaatgttaatttatttgactcttgctagttttcaggtacgcaaaaggaggagatgatttcctttaaaaactcagctttgaatagttcgtgttatctggtatatctgaaatattcagaaatgttaaaacagtttttgtttgcctttgctgttaagtttgaaacctcttagtgctttcaattgataatcctggaaaccaacctcagtattgtagtattacatagattatcggagtttttatagtcttgaaaataaaggtactaataatcatagataatatttgctgaacacttagaatatgcaaatttgtgttttaagtgaaacatttcaggtaattttcataataaccttgtaaaacggagaggaaactgaggctgtgaacagttatgtgatggatagattt

SEQ ID NO: 94414 - DNA, 25048 bp, Homo sapiens
gatcatttggcaaagtggtcattaggcaaatgggtcatttggtgaagaggtcatttagtaaatcggctttcaacgacttgccctatgagatttctctagagtgagcattttcttgggttcaatgtacacttcatttccataatgaatactcactggcggctagatggaaaacttcccagggaaccaggagcagccagaacagcctcttaataatcaggcaattaaaaaccctctggtttcttaacaggagggaggtacagacggcatctgctctgcaaggcacagtgatcgggctcagcattgtcactggagctcttgcggttctgtttgctgctagtgtgacatacacagcccttcgtcggaaaaaggacagagtggtctttgggtctcccgtagttgatcatcatatgtcgtgataacccatgacaactccttgccacatgccacgggaggtccagcactccaagaacccagcagccagggccggcttcatgggcttgaacctggacagtcccacagggacacagaggagtccccactgtggtttaataatctgccatcaccatcttgaaattctttattttttaacaagggtggccagggatagtggctcatgcctgtaatcctagcactttgggaggccagggcaggcagatggcttgagcccaaggagtttgagaccagcctgggccacatagcaagaccccatctctacagaaaatacagaaattagccaagcctgtagtcccagctacttgtaggctgagatgggaaaattacctgagcccagggaggtcgaggttgcaggagctgagattgtaccactgcactccagcctggatgacacagctggatcttgtctagaaaaataaccacaagaccgagcacggtggctcttgcctgtaatcccagcactttgggaggctgaggcaggcgatcacttgaggtcaggattttgagaccagcccggccaacatggtgaaaccccatctctactaaaaatacaaaaattagctggacaaggttgtgcatgcctgtaatcccagctactcaggaggctgaggcaggagaatagcttgaacctgggaggaggaggttgcagagagccgaggtcgcgccattgtactccggcctgggacacacgagtgaaactccatctccaaaaaaaaaaaaaaaaaaaaaaaaaacacaacaacaacgagggccctgcaggtggctgaaaacaacagaaatgtattgtctcgcaggcctggatgctagaagcccaaaatcaaggtgtcggccgggcttcacttcctctgaaacatgtaagagagaatgcttccttgcctcttctggcttctggtggccgctggcaatgcttggtgttccttgtagatgcatcgctccagtctctcctccctcatcacatggctgccttctccctgtgtctctgtctttatctgacattctcctctattattttatttttttgagatggagtttccctctgtcacccaggctgaagtgcagtggcacaatcttggctcactgcaacccccgcctcccaggttccagtgattctcccatctcagcctcctgagtagctgggattacaggctcccgccaccacgcagtgctaattttgtgttgttagtagagatggagtttcaccgtgttggccaggctggtctccaactcctgacctcaagtgatccgcccacctcaccctcccaaattgtgctgagattacaggcatgagccaccacgcccggccctcattctctccttttataaggacacctgtcgttgcatctgctttctcaccagcagaccccaatccagtatgactcatcattacttgattacatctacaaataccctatttcctaataaggtcacagtcctgggtacggaggattaagatttccaattttttccctgaatcaattttttctgagtcagggcctcaccctatcacccaggctggagtacagttatgtgattatagctcactgcagcctcaaactcctgggctcaagggatcccctgacctcagccttccaagtggctgagactacaggtgcacaccaccatccccaactaattttttttttttttgtacagattaggtctcactctgttgaccaggctggtctcctgacctcaagtgatcctcttgccttggcctcccaaagcactgagattacaggcgttatcccgtgcctggccctctttctacacctcaatcattgtatcattagcctgagctgcccatattccttattctgcccttccctgaccaatctcctcctttaacataacttccatctcgatatgatggggcctgctgggcactgcaaacagcctaagaaaagtggaaactttacttgaccttcaattctattacaaagtccacattgaatgtaatttatatttgaactataaaattttctgtaagttgaaacatgacctataaaggtctctacaccctgaagcaacgttttagaaagaaatcaataggtccttttctgcagaaaccattaaccataggagagataaaggaaaaacttcaatgtactgattgaacttccatgcccatagcttaacttctaaaaggcaaccattccataccgttaaactgccttaggttgttattactgttattaaagagaccctaaaagccagaagttgaaccttgactgtagttcttgcacgtacacgcacagtcttgcaactgaaaccactcagattgtcctaatgctgctccccatagcaacaccacctggaattttacgtttggttttaagtatcagtcctaatcttcacttgcacccgaacacaccgcacctgagagagccacgtgacattaaaaaatcccttcagtgaggccaggcgtggtggctcacgcctgtaatcccagccctttgggaggccaaggcagatggatcatgagttcaagagacactcgtggccaacatggtgaaaccctgtctctactaaaaatccaaaaattagccaggcgtggtgacgcgtgcctgtaatcccagctactcgggaggttgaggcaggagaatcgcttgagcctgggaggcagaagttgcaggagacgagatcatgccactgcactccagcctggcaacagagggagactctctgaaacaaaaaaatcccttcagtgccttgatccttccagattcagatccaagatagatgacatttgtccctcatcggagcccgcacaccaagataaagatttcttctggccgggcgcggtggttcatgcctgtaatcccagcactttgggaggcagaggagggcagatcacctgaggtcaggaatttgagaccagcctggccaacgtgttcaaaccctgtctccactaaaaatacaaaaatggcccggcatggtggctcacgcctgtaatcccagctactcgggagactgaggcaggagaatcgcttgaacccgggaggtggaggttgcagtgagcagagatcgcgctattgcactccagcctgggcaacaagagagcgaaactccgtctcaaaaaaaaaaacaaaagaagaaaagatttcttctgtgtgcatggctcagctctgtggtccgctagggtctttcctcaatccgcttccaatctatggaatcaggaaagactgaaccaacctcgatttattaatattttagtataacataatacagtggtacttattatagtattgaccgtatatgcccttttgctccttggaggaaaggcaattaatagctattatgtgagttaataaaataagcccaggatttatgagtgtaactaacctgttcccattggttttccttctctcctgcaggcagagagctgatcaaaacagcaaaagcaaagcagtgccccggcccagttctaaagccaaccttccttaatcacccagacccatcccaggttaggacatgctgtggattctcaggtgactccatctcaggatacagggactgagagggtgtatgcaatatctcagacccagaaactgttgattctgtctaaaaacacagcaataaccacatcccaccctcttgatttaaatgaaagtgtttgggggaataaaagatgaaccttttttttttttctttgtcagatcttgcgctcatttggttctggtggggaacaacagctgtgagagaacacgtgtattcaaatagaattaattcccctctcttattctcgcagctgagcagggctcaagtgcctctcatctgaaagaggtaataagattttgtctgtctcctcatctaccttttgcaagtacactgaacaaattagctctcgggactcttccaaatggagttttatgagggatttgctaaggtaaacgttttagactttgaacacagttcagatttcaggggcagtactgaaatctgaactgtgttgctaactgcccagcctttcaactcaagacacaataactttgaactaaaataattatatttttgttgttttccactctgtcccccacgtctatatcaccaccacccccaatcccgccccccaggagctaactcctccttcctgtccctgcaagatcaaaactcctcctggaagccccgctagctctgtctgctcgccttcgtggcagatatcgctattgtacttttatacttatttgtgtgataagtacctcaatgtccacttcttccacgagcccctgagcccctggagggcctggaccacacctagtttttctcactgttacatctcccttgccagacacatggtaggcgcttaataagtatttggtgaacgaatggcttgtttggtgacagtccaaagggtgggggacagagggaaaactccctcctatcgggccccggacgggtggcgctgatggagaggaggctaggataacgcctccaggaccgaagcgcgcacccataaggcccctgccaaaaagaccttcctgaaggcggaggaactgcgagagtgcctacgttggcccaaggcctgaccggacgatcccggggaccctcgccctaaccggccccgactcccgggccccaaacccggactcggccccgcctgaagctccggatcctggggcccgtccctggctccgcgtcggcagaccgtgggctcgctcctgggcctgcctcaaactctccgcaggtaacgcctcccgaacttgagccacgctccaatcccctcctcaaacccctccccgtttctcacaccctggacccctcgctccgtctcggccccgccccaagcccagctccctctcggcccctgagcccagccccgacccgcctcccagtccctgggtccctcccgacaccggcccctccctaagctccgcctcccagggcccgcctcctgagcgcagccagcagcccggactcggcccsgcctcccggaccctgggcccctccccacgtaggcccgtcctaagctccgcctcccagagtccgagcagcgcctggccacgtgctacgacatagtcaacgccccgccctggccccgcctcctgagccgttctccgggtctggccttagccccgccctaggacctgtctcctgggctctgctccgagtctcgcctcctgaacccaatcgtcctttacccccaccctaacgcccgcctccaggactcttatcctgcccccacgcaaggccccgcctccaggacgtctccaacctggatgtttccgaagccccgcttccaggatcgccctgtcctggccccgccccaggacacgccaacctgaactctccccaggacctgccccaacgacgcttctcctggccctaccccaggcctcgccctcaagacgctcattctggccccaccccaggcccccgcctcataacgctcatcctggccccgccctagagccgctcccacgactctcatcctaagcctacccccaggccccgccccctctctgcccccgcgcactgccctgggcccgcccccttttcagtccaggctcggcttccgcccggtctcccggcaacgctgcggccccgcccccgtcatggtgcccgaggagaacgcggggaccgaactcttgctgcagagtttcgagcgccgcttcctggcggcgcgcgcactgcgttccttcccctggcaggtgggcggcggggcgagcggagaggcccgcggggctcgcgggagtccaggggcagacgggatgggtctccgtgctgaagcctccagcgctcccgccacgtgaatgcctgggctcccgccggtcaggtccgcgcgacccggtccccgtccctggggcctggccagagttgctcgcacccctcctgccccgcgagctggcgggagaagctgggggcctctccaccgtcttggggggcagacgcgcactcgttgtggggtacagttcacgatcattttcacgactttttaaagacagtaaccgttctggtcactgggacagagctgccctcgcccattctaaaaagtcagcgccctcaggaccacgggtaaccacgtcctcctgagcgcagtgaccaggtcacaggctgtctctcctgcctcagtgttctcgtctgtatgtcgagcactgcacagaatcggctcatgctctgaggttctcacgcctgtgatggaagagacagagaagggggtggcctctcgtctccctggggacctgccattctcagcacaggcgcatggcaggcagcagcctcccttctgccagtagaggggcttaatgcacccggccccatttgtaattcatgtgcggtgagctcactgggatgagtgagtttggatatatattcctccctgggtctgccccattttatggggtgttgcttaatcatttgcgttattccattgatatgaaatatttgcactcagagatcatttccggtcaggagaaatttgtgcacttttaacccaaaatagaaaccttcataaaagcatcataggtctccattcaatattgactataattgttcacatgcccacgctgaatgctaacttgggctcaccctcaacacccacgaggtgggtactattattaccactcacatttgaccagagggattgtttgattagggtgcagtagttgagagttcagaccyaggagacagcctgcctgcttcgaawcctggcccaacccctggccctgtgtgaccttgggcaagtgactgcatctctctgtgctgttgttttcttattaataaaatgggggatagaatgatacctacctcttagggttgttgtcagggttgagtacaaaagcctgtggatcagtgcctggctcatggtaaatgcatgtcagtgttagmtagtgtttttattcagtctcaaaatgtttaataaatgccttctatgagccwgacaccatggatcagcagtacccgtgacagatgagggtctgcttgcatgggagagccagagaataaacaaagaaatgaagaaacaagaaaagaccagatgagagtggctttaaagccaataaaacagggaaatggtgaatggagcaactggggagaagagtcaccaaagtcggggaatcagggaagccttccccaaagaggtggcatttgaactggggcctgagtgktgaagcagccagccatgggaagggcttgggggaacaggatatgcacaggtcctgtggtggaaacaagccagytgtggttgaggaacaacagcaaggcagccagtgtggctggagtggagtgagcagggttggccaggggtgagggagaacaggccagagagagggattaggaccaggtcttgtagggccttttacggcaatggaaggagctctgaagcaatgaagtgccttgccctgtgtcacataccagccgagacagtctacctaattcgggagccaaagttcgctgctgggcttgaggcccctgtaaaaggacaatgtaacccaggctggtatgggcacattctgcatttccacttagatggcaagcccatcaaaccttggtgccatggctgccctggtaaccagtgcaatcctggctgaccagtgcaaccagggagctggcccatgacccaggtggcctctaagtagccaggactaatgcggccaagagtcagtcttctagccttcttcctgtgactcatccaggtgcaccctgcgacatctgaaggtcaggctttcagctgctgtggcttccacttccaactggctccacgtccccagggagagatcacacagcgctttgccaacacattctattgcgtgtttaatgttcctgtgaaagcgcccttgagatttctctctctcccctccacacagagcttagaagcaaagttaagagactcatcagattctgagcttctgcgggatattttgcagaatcccagatatttgtaagaatcccagagtccctgggactcatgaccctgcctcctgaatctctccggaagacctgagagaagaaccacaggtgtgcttgtaccctttaaaaacacacctgttcaaagaacattgaacattgagtcagcactgcaggtgggtgtcggcacctccgacagctccagctctttcattttctatctaagacttagacaaagacatcagaatatacaaaaatctgcatgagaggggggaatctagggaaagttttttaaaccatctacagcaaaaacagagatgacaggtgcaaaacagcttctagcatttggtagatgctcagagactttcttttttgcattcatgagacctgtcctgcccactcctgtctcttctagacctaaatgggyccttactttgcccagggtggggtttggactcaagagcatctgcatgcaggtgagaggcaggatcaccaccccgcccagscacagcctgactttggccttgagggccaagtgcagatcaccctgcatcctgggtcttcaccttcgaagggccatgagcccttctgaaaagacaaagcaatagactccctcccagagagaagtgcaccagaagaayacattttccatacaaactctggaggcagacatcctccacctccacccagccagcccatcctaggggccccggtgaagaattcttgtgctagaggtgaaccaagattatccatgtggaaaagatgcagccacaggagggaagactttcggggcaatgcagtaggtcagggcttcgagcatggagatacctgaagttatctcgcaccctgctctgagtttcaccctgagcctcactctcgtaggtggtgaagcatgaaatgtagggatagctgctttaaaacccagcacaaggctgggtgcactggctcacacctgtaatcccagactttgggaagctgaagtggacgtatcccctaaggtcaggagttcaagaccggcctggccaacatggcaaaaacccacctctactaaaaatacaaaaattagctgggcatggtggtgcacgcctatagtcccagctacttgggaggctgaggcaggagaatcgcttgaacccaggaggcagaggctgcggtgagccaagattgggccactgcactccagcctgggcaacagagcgagactgtgtgtcagaaaaaatgaaaaaccagcaccagcctgaagagcctgtgtattgcgtggggtactttgctgcccttgggcagaatctgcatccctcccagccagcaggcgctgcggaccgtctcctccctctccctccaggctcctgttttcccaccgcccccctcctgctgcagcagtccctctgccctccgttccaagtgccaggccgcggccacctcagagcttgcaccagctgttgccactgcctggaacttgctcgtcctgcactcggcttctctcggctttagctggagtgtcaccctgagcgtcccctcccctccatcctgtccccagggacacacactccaagagagcagttgccaagtgggccttcccgcctcttccatagagccagacagttggcgactgtccttactgcaaaccctggttcacactggcacccctgggagggaggtggtttgggcccacgtgccctgtgttcctgctcagaatgggcattagaaatgctgccatagcctgtgccactgcagtggaagcatttttaggaaacggtttatatcttaagacaaacttcagatgcatggggccagaacgctgtgtccatctatatctttgctgagggatcgggtagcctggagtttgccctctgctgtgttggcttgaagctcataggggacttaagacgggctctcgagcaaccaacgttctgtcctttgccgtagactgtgaagcatcctgtgtgtgtgaagcaccggccgtcagtcaagtatgcccggggctttctctcagaactcaccaaaaacgtccgttatggggagtgtccgcccagtagccagacagcatagccacctgcgtgctggagcccctgtccttcccaggccctgggcctgctttgcaaacagcagcatgacaggggcctccccaggcaactgactgcagccacgtgtgacccatgggagacagtgcagggcaggaagaaggggaggccagtgtctctccctcactctgcctcctggggtttccacagcagctgcttctctggggccccagctcctagcatatggattctcattcctaccaggctggtccagcccacagcactggaaccctcacccacaccctctgtcctgcccgccgaagggtttggagtttcctgctcttgtctgtctctgggttgccccatgggcccctgttggaaggtttagctcttgccatacctttggaactagttcctctggtgaattctctgcattgatcctgctggaatgagctctttcctgactgatgcaggatggattttattttttacttatttttttgagacagagtctcactgtgttgcccaggctggattaccgtggcacagtctcggctccctgaaacctctgcctcctgggttcaagcaactctcgtgcctagcytcctaagaagctgggactacaggcacatgccaccatgccyggctaatttttgtatttttggtagagacagagtttcaccatgttggccaggctgatctcgaactcctgacctcaggtgatccacctgcctcggcctcccaatgtgctgggattacaggcatgagccaccgcacctggcctaggatggattttaaagatgggcccgaaagtgcagggtttgacataaggatgtcgagaggccattcctcagtaggcagtagcagacctrtctkagtgaaagggccacacttttagcaagtaaacaatcccctgcttctccaatacctgctttctccctaatcctccccaaaagggtgcatctgtggtcaccagcaggtctgccctgtgccaccaggagagggcagcagtcacccastgtatattgttgctgccctgtgaatcttargatggggccagccmtggagaagcagcctgctgacagccacagcctgcagcatgggcygccctcacagttstgcctgggctcacttaaaagcaccttttgttttcctsctctctgtcatggtcatgtggcagctctcacggaatccttgtctcctgccctagactacacctaaccctaccctctcaacacctctcgttgaaggccctcccatccaggtttccctaccaagtgaattttttttttagagacaaggtctcttgcccaggctgtcctcgaactcctgggctcaagcagtcctcccatgtcagcctctagagtagctgggactattcggcacacaccaccatgcccaatgaagtgaatrttttacatgccagctggccggtattacaccattccatcccaaatctcccctccaaacttggtgaaaatcatctgaccatttttacagattagaacgaaagcaaacaagctctcactctgtctgaccccagcamgaggctgtccacacagagcttttggacaagctgtacgaggacctggcagagaccctgatggccaaggagtccacccagggccacccgagctatttgctggtatgagaagggcaccctcctccccctcacagcccagatacccttcctgcacaaagtgaaaacgtgggtgtgggttcaaatcctgactcacccattctgcagtcttagacatgaggtccgtcaaccttctttagcctcagtttccctgtctgtaaatcaagcacttcaacaacaacagcatgtctcatggggttgttgggcatttgtccaataggtgacacactctacctgcttcacaaggacctggtgtccagtcctcaaagaatacttgacaggtcctggtgtggtggttcacacctgtaatcccagcactttgggaggctgaggtgggtggatccgaggtcaggagttcaagagcagcctggccaatatggtgaaaccctgtctctactaaaaatacaaaaatcaggccgggcgtggtggctcatgcctgtaatcccagcactttgggaggctgaggcaggtggatgacctgaggtcaggagtttgagaccagcctggccaacatggtgaaactctgtctttactaaaaatacaaaaattagcgggtgtggtagtaggtgcctctaatcccagctactcgggaggctgaggcaggagaatctcttgaacccaggaggtggaggttgtagtgagccaagatcacgccattgcactcctgcctgggcaacgagagggaaactctgtctcaaaaaaaagtggaaaaattagccacacatggtggcacatgcctgtagttgcacctacttgggcagctgaggcaggagaattgcttgaacccaggaggcagaggttgcagtgagccaagattgtgccactgactccagcctgggtgacagagctcaaaagaaaataagataaaacatagatacagaaaaccacaaaggaaaaacatagcatattgaatcatcacaaggcagccaccccttcatagccacaccyggcccctggccaccactgaccwgtgctccatcaccagaattccgttgtctcaggaatgttcratgaatggaatcctgtrtggcctgagatgagtgtctttcatgccacrtgacacccttgaggcccgttcaagctgwtggcatgtcaacagttagctgcttctcattgctgagtrgcgattggtcctgtcatggtttattcagccatgtggtggatggctacttgtcttctawgccacttgycttctgattgctggactgactctctcgccctctcttggtgcagccctcgggaggctcagtcacactctccgagagcacagccatcatctcccacggcatcacaggcctggtcacatgagaagctgccctctacctggcagaatgggccatcgagaacccggcagccttctctcataggtgacctcggggcgcacggcaggacaccgaggcaggctcaccctggtgcagtcacagacatggtcccctttcctcccgccaggactgtcctagagcttggcagtggcgccagcctcacaggcctggccatctgcaagatgtgccgcctccaggcatacatcttcagcgactgtcacagccaggtcctcgagaagctccgagggaatgtccttctcaatggcctctcattagaggcagacatctctgccaacttagacagccccagggtgacagtggcccagctggactgggacgtcgcgacggtccatcagctytctgccatccagccagatgttgtcattgcagcaggcaatgcccagccccrggcactctgtgcaggcggtgtccttgcagctctacccagctctgggctctgggaaaagggaacaatggacgctgtcgggcatggacatgatggggcttccagaagagttactctgggcctccagggtgacatcaaaggacaggggtgcctcttaaggtgaccttccagccacagccctcttgttggagacaggcatactcccattacagtcatcaccacatggctctgtcccagagccatgcctctgtctttcagagaccacaggaggaaaacmaccacttctgggatgaggacagggcccttgagagaargtggtgtttggctgggccaccgaaaacccctcgcccctgccagcacactcggtctcctctctsgtygaacagagctctgcctgtggtcctgggtcccagccctgaaacccacaggtccagcggtggccagggacacaggcccacccctgcaagccagcagacaaatcggcagacacctgaaacacgaagttcatggcagggtcaggctttgtgtcattcacagccctctagataggccgagaaccagagctcgttttttaaggaacaccagtgagtctggagatttttttcttttgcttcggtcttttgcagctttctctactaagggttctcctttttcacccaagcaattgcctttccatctaatggcccaaatggtcaaatggcatctactagtctcatatgacygctgcctctctggcctcgmcctgctgctgaggtcagcatgacctggaactgtccgctggtccctttcagtaacctgaagctttcaccgtagacgtrcygtattgcccagaatccatcgtgtcgctggtcgsggtcctgcggaggctggctgcctrccgggagcaccagcgggctcctcaagtctacgtggcccttaycgtccgcaacccagagacgtgccagctgttcaccaccgagctatgtgagcccacacgcccacccgggcctgcatggtccccgagctgtccctgcgggactccagtggaagtgaaagaactgggggccgaggaaaagctaggatgccccacactcccacaccatgcggggaactagggcagaggccggtgagcagggtgggcctggggcgtgggagcttgcggcaggaggagggcagctcagcacagggagggaggatctgagcccagcagccctactgtgtgcttcagagcagggttccctaagcccttgggcgtcggtttcctcatctataaaatggaggtggtgggaggggcagtcggggtcagggctggacacagctgtggcctgcaggacgctggagcacaggctgtacaggcggatccaccacgccactgtcctgagcacccagttgatggaagacgagcagggtgactatagagaaggggaattgtccccgtagtgggccagccactgtcctcagacctgacatttgtcagcccccagcacctgtgagagtgtgctatcattgtcccatctcaccgacaaagacactaggacacacagaggccaagcaacccctgagctcccacagactgcagctcggccacctggctctcgtgcctccacactacacccaagccccccattgccaccagcctttgccccagmtcaccctgagcacagcccctcctggcagccatgtgcacagatgcacgcgcagcagcctctgcctgcacacagagacgtgggtccaatgcctgtccacgtggggcagcrcgttaactacagagccaacaaacaagccagcacacgaaggcatactgggttccacgacaaagtcctgcacaacctcgcacaggaggctggccgggcgcggggctcaggcctgtcaacccagcactttaggaggctaaggcaggrggacttcttgacaccacgatttcaagaccaacctgggcaacatagtgggaccccatctccacaaaacattcagaaactagccgggcatggttgcgcacacctgtagtcccagctactcgggaggctgaggcaggaggatggcttaagcccaggagtttgtggcccccttgagcaacatagcaagacttcatctcaaaaaaaaagtatcacaataatcattttcacataagtatacctattggggaaaacctagaatatatatgtagcaggctcgtccaatctgtggcccaacacaaatctgtaaactttcttaaaacagtacgaggtttttttgtgatttttttttcttttagctcatcagctattgcgagcattagtgtattttatgtgtggcccaaggcgattcttcttcttccaatgtggtgcagggaggccaaaagattggacatccctgatatacacattaacaggtgccatccttggatggcaggattatagagacttctacacgttcatgtctgtactactttatttttataaatacacattttccactcgtaacaaaaaactgtgattgaaaatcatcccgtgtcacagtgtctcacgcctgtaatcccaacactgtaagaggcagaggatttgggaggctgaggtgagcggatcacttgaggtcaagagttcaagaccagcctggccaacacggtgaaaccccatctctactaaaaacacaaaaattagccacgcgtggcggtgcacgcctataatcccagctactcgggagactgaggcaggagaatcacttgaacctgggatgcattgcagtgagctgagattgcaccactgcactccagccttgggaacagagtaaaactctgtctaaaaaaaaaataataaaagagtctgaggcaggagcatcacttgaggccatgcattcaggaccccatctctacaaaataaaaaaattactagcatggtggcatgcacctgtcatcccagctactcaggaagtgggaggattgctagagcccaggagtcgaggctgtagtgagcaatgactgtgccactgcactccagcctgagtgacagaacaagatcgtatctcaaaaaaaaaaaaaaaagaaaagaatcattctggctaacggctcttcagacatctttgcttatgagaacaccagccccttctaagctgtgtgtgtgtgtgtgtgtgtgtgtgtgtgtgtgtgtgtgtgattttgttttttttttttgagatggagtctcactctgtcactcaggctcgagtgcagtggcgcaatctctgctcactgcaacctctgcctcctgggttcaagcaattctcctgcctcagcctcccaagtagctgggattacaggcacccgccattgtgcctgcctaatttttgtatttttgtagagatggggtttcaccatgttggccaggctggtctcgaactcctgatctcaagtgatccacccgccttggccggcctcccaaagtgttgggattacaggcgtgaaccactgtgcctggccgctttctaagctttgtgaagagtgagttgactgagcagccaggtaagtgtgggttcagatctctgcgtctgtcccgctgtgccaagtgctgggcagacgcgggcagagactggacagcggcacggtgcctgctgctagccatttctatgcaaaaccagatttctggtcccatcctggaggccaattctaggcacctgggtgggcctgagaacctgtgaaccaagtaaactgacttgtacacgcccccaccccgccaggcctgtcctagcagccccacacaatacgctcatgtcctgtccccaaacactgccatcttcaaacacatgtcctctgtttccaggccgggcygggatcagatgggaagtggaacctcgtcatgaccagaaactgtttccctacgaagagcacttggagatggcaatgctgaacctcacactgtaggactcacacacgactccaacgggattgtkagratcaagtcactctcrtgggaagartttttatatgggaaagcggataaaactttcattggactggaatgtttggagaatgttaatttccaaatcaggaaccacaaactgccctctrataagacatcggctatctaagcttgtgggtgctccctttctgccagcagttctggttcttaagaaaatcrccatcaatcagacatgaaaactctggctccaaaaatagcattttctttgtgcaaataaaaacgtgtgtatcaagtatgatgttccccccaacgtggacacactcggttccycacaaagccaagcccgctgcagctgccacatctgtgracacactcggttcctcacaaagccaagcccgctgcagctgccacatcggtggacacactcggttcctcacaaagccaagcccgctgcagctgccacatccctggacacactcggttcctcacaaagccaagcccactgcagctgccacatccctggacacactcggttcctcacaaagccaagcccgctgcagctgccacatcggtggacacactcggttcttcacaaagccaagcccgctgcagctgccacatcggtggacacactcgattcctcacaaagccaagcccactgcagctgccacatccctggacacactcggttcttcacaaagccaagcccgctgcagctgccacatccctggacacactcggttcttcacaaagccaagcccgctgcagctgccacatccctggacacactcggttcctcacaaagccaagcccgctgcagctgccacatccctggacacactcggttcctcacaaagccaagcccgctgcagctgccacatcggtggacacactcggttcttcacaaagccaagcccgctgcagctgtcacatcggtggacacactcggttcttcacaaagccaagcccgctgcagctgccacatcggtggacacactcgattcctcacaaagccaagcccactgcagctgccacatccctggacacactcggttcttcacaaagccaagcccgctgcagctgccacatccctggacacactcggttcttcacaaagccaagcccgctgcagctgccacatccctgggcttatggtgcagcaggtgcttttttcaagacaggaatcaaaatgttaggaacacggcagaaaggtgacacctggagaccaaacgcaggatgaggagtactgcagaggtyacagggaagtcacagaacagtaatacgctagcaggrgcatggggcgtgaagaacagaagaagagaggaagtgtttccgagcctccagaaaagaaatcagagccaagcacagcttcccgggtcacagaaccaattcattcaccaggtggcactactgccatcatttcagcttctggccactgggaggcgctgctcgaaaggatttgccctgagactctgagaagaagctgtgggaaggacagcaggggtcccggggttttagcctctggcccaggagttatgtgtccataaccaaagggagcacagtctgcacccagctctaatcccatcggagctgctgcgactcccgcaggttcttccggaactggtttagcttgcccgcaggatcaggaaagtttgagaaaagcacctgcaaaaaaataaagagcagagcttacctcattgcctgtccccaccccatcccatgtcaccacctggctgaccccaggtcccctacccaacaacaacccctcccaagttcctaactccctcacttggactcgagactcttcatgccccagcagcgctctgcctccaacttgacatcatgctttctggaaacttccccgtatgtcccactttcccacacttggtgccctggagcacctcctggcctctacatgctgtatgttcccctgcgagcaccctcctcttggcctccggccaagtcccacccatctgtgggtaacaagggggtgtcggtgttcttttcagccttgctaaactgtctgaatcaaggatcacaaactacagcctgcaggccaaatccagcccacagcctgtgtttgtaaataaagttttattcgaacaaagccacaccccttaatcgacagatgatctgtggctactttcacaccacaacagagtaccatggttctgacagagactgggggacccagtctaaatgacttctgacctggacctttactgaaaatcctgccaatcattctgttggcaagaatgatgtattacttttagcaataagaaacaagtaacctttgcagaattccacccatctttcaaggctggtcccagaagctccctttgcccacgcacctacctgaccctgatcacttcctaaactgcagcccggcccacccggctccagcatcatttgtggaatgtcagctccataaatccagagggcaggtgggggtgtgtcctaactttcccgagcttactgtaccgaaacgggacagcagagtgggccggactctgtgacctctgctccctccctagcttttccgccagaccccacatggtcccaccctggctgtgggaagcagggatcagggagcgtggctcggtgccagcctccagaaccctccccaccctggcgtggtggcagatgtggctacctgcagctgagctgccagttcctctgagtcctcaaagaccaggccattttcttcatgtttcaccagctcatgtaaactgcagagagaaccaagggagcctgagagctgcctggagaagacaccagacccctggggtgcccacctgggctccccccaacaacccatgctcaagccaggctgggggttggaacagggggtgtggtttctgggagctggttcttagatttggcatctgaagggtataaaggcctgggggggtgcacatcgaaatggccaaaccgatttgaggagggagccttaaggagggtttctaccttctgtgctggatgctcttcaaggactgaagaattatttttgcatgttttgcttaattccatggccatggaacaagtaaaggcaacaccctggggactggctcagcacataaaagatgacttttctagggcaccaggtttgatcccgacattccctgagctcagctcacacgaggggctcacatccctgactcccatccaggagccggctcctgagcaggggccaagggctcagcttgtgctggggctactgcttctagaatctcctctaacaccgcccttccaaatgcccgtctacgctgggtgcagtgaggccacagcacgacactcatttaactcattcaaacccagcacgtgagcttggccaaacaggacatggtgggagagaaagaaacaaagaaaaccatgtaagcctgcaggcaattcccgccaattctactctaggagcaaaagccccgagtggagttccagtatttaagatgcttttttttcatattaggttggtgcaaaagtaattgccatctttaatggcaaaaaccgtgattacttttgtatcaacctaaatataacatgagctctaaatggaagcaactacttcagtgaggctcagcccagacacagtaaccgcagggctcctcctcgtggcctccagtgtgtgctggactgacccaggagcagggcctcactgtgggcagctcgctctgcactgtttcctcctcagcggtggatctgtgaagctatccccagaaagattcgggttctgctcctgccacttgaagttcacggcacacacaggcaaacagcacccgaacatgtccaccaccttcatgggcaggtccaggccactgcaggacgtgtgcagacagacacccagatccaccgaccctgctgggcaagaggggtgcggtcagagcgctggtctctgccctgggaacacaaatcctcccagcacagtgaggcaacatcccccgaggggagtgaaaatcggataagtcccccgacagccccaagcacaagtggcttaagctggccaagcagccacatggcctggctgggacatctgaaaatgtaagttgacactttttctacgtaaccacaatttggtttttttgttgttgttttgttttgttttgagacagagtctcactccgtcacccaggctggagtgcagtggcacaatctcagctcactgcaacctccacctcccaggttcacctcccgcatgtaagcccagcattttgtgaggccaaggtgggtggaacacctgaggtcaggagttcaagaccagcctggccaacatggtgaaaccccatctctactaaaaaaaatacaaaattagcgaagcatcgtggcaggtgcctgtaatcccagctactcaggaggctgaggcaggagaattgcttgaacctgggaaggcggaggttgcagtgagccaagatcgtgccattgcaccccagcctgggctacaagagcgaaactctgtctcaaaataataataataataataataataataataataaaaaaccacagcacacccactacaaaccagctgtcagtgtgaaaataaagtgaaacagcttaacatttctaaagactagctggggcyaggcgtgatgggtcacgcctggaatcccagcacttagggaggccaaggcaggaggatcacttgaagtcaggagttcaagaccagcctggccaacacggtgaaaccctgtttctactaaaaatacaaaaataaaccaggtgttgtggcgggctcctgtaatcccgtaatctactcgggaggctgaggtgggagaatcgcttgaacccaggaggcggaggttgcatgaactgagatcgtgcactccagcctaggcaacggagcgagactgtctaaaacaaagactaactggagagtcctgccaggaaaaggccctcagcctccaactgctctgctcactcgaagctggaagatgtggctctagagacgcatcaggaccaagccacgactccccacttggagaagtcaacggggaaagagacggaggcaaaggagaaccatctcactgggagaggcgacgctgtttcacacatcgtccctgtacctcccaaagccactgccctcccacacctgggcaacagtggccccaaccccaggcccagccctcctgcaggaaggaagaggactgaatggagggcgcggaaggctgaaaggacgtggcctcctcaaaccccttggtaaagggcctctggggccacctggcagggaggggctggcacaccaggaagtagcctcctcccgggagttcagccagagcccaggtcctgtccccaagtggcctccagagccacattttcagaaaaagtacatcccgcccacccctgttccccctgcttaaggccccgcctcctccctgagcctcctgctggcctctcacctagaagcgggggtagtcctcggcctccagccarggggtgcagacctggatgtgctggaaatgcttctggtggatgaggcggctgtaatactccctcggaggccctttgccttcacagagaagagcagatactgccatggactcgtctctgtccctgccaattggcctcaggcccaagacactccccccgaggagggatccctttcccagaagctccacccctcggccgctccagtcaggtcccatccaggcccttccagaagcaacgcaggagcccctagacctgcaggggtgtgtgcactctgacccctgacgcacagccctgcatttgcagccagctggcctcgggctgcaaacatggcggggtaagcactggcctggcagtcgaccgcccactgggtggacccagccttctgtctgtgttgtgcacaggggacacgaggactccccctgccctgccacagcccccagagcacatggcgcaggttccaaaccgcccctgccctgccacagcccccagagcacatggcgtgggctccaaaccactcctgggagcctagtggccagaggagggaggagagcaggaccagcagctggcccagaccccgcctcttcccacaccacttccgcttttctccgtcctcagagtcaccttgaaagggctcagcagcagtaactgtgggacaggggttcttccgtttgaaaaattaaaagaggcttggttaaggcaccaatgacatggccaggcacagtggttcgtgcctataattcgagcatattgggaggccaaggtgggtggatcacctgaggtcaggagttcaagaccagcctggccaacatgatgaaaccctgtttgtactaaaaatacaaaaattagctgggtgtggtgggcccctgtagtcccagctactcgggaggctaaggcatgagaattgcttgaatgtgagaggcggaggttgcagtgagcccagatcacaccagtgcaccccagcctgggcgacagagactctgtctcaaaaaaaaaaaagaaaaaagacaccaatgatgtaacaacaacaaaaaaaagatgcttggaaactactgaaaaagtagaaagtttggtatctacagattcaaatctgggctccctgccctgctgtgaaatcctctgagcctcagtttcccccatgtcaagcagtataagaccctatggcagagagctgcagtgaagattaaggagacaagatcgtgggaagcacagggtaaaggctgcgtgcccctccccctccgccatcccccaaccaatcagacacccagggtcctaggcggtacctgttatcacacagacgagagaaggaaggttgtgtccatcaagagtcagttgttcaaactctgtgtttaaaaaaagaaacaattctacatggaatttctgatagaatttcttttttttttttcctgacagactcttgctctgtcacccaggctggaatgcaatggcgtgatctcagatcactgcaacctctgcctcccgggttcaagtaattctcgtgcatcagcctcccaagtagctgggattacaggcgcccaccaccatacccagctaatttttgtatttttagtagagacaggttttgccatgttggcctcgaactcctgacctcaggtgatctgcctgccttggcctcccagagttctaggattacaggtgtgagccaccgtgcccattcagaaaaaaagttttaaataaacaatagccagagtcacctgttcaggtggagaaagagcactgctctggtggggaggccaccagcctctgtgagatactctcctggagggggcatttcagcctgagggcctggtcactgaatgacccaactggggattcagggcggcccacctccaccacccccgctgtccccaggctgccccacccagtggcccgggacagcaacacgctgcaggccaggcaagcagctcacagctcagcggcccccgacaagcccatagatcctcaccgcagctacacacctactttctaaagctgccagcagatggagaagtcttcgtcctctatgagaagagaattgaatgtcaggggcctgtttctagacacccctcttccagctcacacgccctccccttctc

SEQ ID NO: 94415 - DNA, 24763 bp, Homo sapiens
  misc_feature (1)...(24763): n = A,T,C or G
tctgggaggtgtgcccagcagctcattgagaacgggccatgatgacaatggcggttttgtggaatagaaaaggcggaaaggtggggaaaagattgagaaatcggatggttgccgtgtctgtgtagaaagaagtagacatgggagacttttcattttgttctgtactaagaaaaattcttctgccttgggatcctgttgatctatgaccttacccccaacctggtgctctctgaaacatgtgctgtgtccactcagggttaaatggattaagggtggtgcaagatgtgctttgttaaacagatgcttgaaggcagcatgctccttaagagtcatcaccactccctaatctcaagtacccagggacacaaacactgcggaaggcggcagggtcctctgcctaggaaaaccagagacctttgttcacttgttgatctgctgaccttccctccactattgtcctatgaccctgccaaatccccctctgcgagaaacacccaagaatgatcaattaaaaaaaaaataatataataataattcttgtcctcttattttacactcataatgagaaatcacaagttctttcttgatgatctgtgctatagatttctactctgtctcctcaactctgttgatatttggggaaaattctgtttttcatagattctttgagatgctgatggaccagcttcagcatgtttgaggttgtctgaaatggagatcactgtaaaactgtctttttcttttaaattacaagtacactggggttaactgtattgctggaaaaacatcaagaatgacagtcttatatttaaggcaccagtcattgtttccattttttttttaattcttcccttggattaatattttctactgaaaagaaatgaaatctcagttccactatgataaaagaaacgaatcaccagtgtctgtcagtgcccccactgctcctcctcataccagcattgacactggtagctgaggaaggggactgctcaatttctaatgtgatctattcaagaagccacatataaaaaggcattgagggctcactgtccagagaattgcttttgtaaatgctccacaacgtatgggcaaaagtttaaggactactgcctgatgtaccaggaatcctgagttctgtgaaaatctgttcattccaaatctgttaagcatttccaaacatccagagaatggtttcactgttgagggtgcatgtggcagaatctgtctctctctgcacctgtcttctgttaccatccctggacagtgacagattttaagccagccaccagaattcttttcgagttaaccatttcttagtttctgtaaattcatgacttgtcttactgaactacagcctggtttgtagacttccaacatctacactgctgctcttcaccattggaattcactgtggtatttatagtattggcttcagtccgagccacaggcaataaaaggatatcagctgtagttctcagctacatcatggtgtatagatgctgttattcaggcgaacttgctcatgggtggactaacacctggtttggtacagagactgagaagtttttcattctggtgtcaaagttttgttacattatgggtgtgaagggcatttgatatatttttcttaactatggggtttatttttctaaatgtgggttgattgactgttaattgattcagggtacccttaaaagaaaagaagttttcccattgtgaaccttaaatgatcagagaagtaagttcattgattaaattctctgttgggagaacaaaacttttctcccttgacactttattatctttgatttttcaaagggccttgattggtggttgtgtctcggttaaaatttatgggactttgctatgtagttggcatttataaaatctgaagtatcataaataaagttatttatttaattatactaccagtcttttttactggtctgattcttttgtgcattcattaaagctgattgtgtgagagtgaactgggacacaagctagtctagctcactgcagccaagcaaaccctgttgatggctgatgggcctttccattagggttttgcttatgtgaagtaatggaattatgttggttattttctttatgaaaataaaccagttcttccaaggaagttaaaaggcttggtatggatgttggtgtcagataggtctgactaacctctccgtgctgcagcctatactaaggtgacccagggccacatgtagacagctaggccagtgctttttcctcttagggtttctttgcagaaagaaacctccagcaagggaagagaggtgtgtgtccacaggaaggggctccgtggggatcccatgaagggatttgagctctttcagctccatgtcatttaacttttttgtttaaccaccttggctttctctccttttttgctgtcctccttacggaccagttaccagattcagaggctaacagttagttacttgttaatgctagtcacagccaggaggtcagaaggaattttctacttctggatccaaatgttacctcttaggggaagttatgccccctcaactattgtcttattataatgaatctttcctttttggtccttttaagtaaccactcaaaacttttcatttcactgaaaaaatatgaaaaaccatgacaatagggctgggtgcagtggctcacgcctgtaatcttagcactttgggagaccaaggcaggcggatcgtttgaggccaggagtttgagaccagcctgggcaatgtagcaagactctgtctctgcaaaaaaaattaaaagatacctgagagctccctttaatatcaaggtatttgcatccattcccaccctgttagctcttaagggaggagggaaatcaattccaaccatactttcctgtgatggaagatgtttcctcttgaaaaaatgccaatacagatttttaaaacctattgttttccaaatgcactttgtaagtttttgcttttaaaatagcttcttggaaccaattttattgtatttgtacttaatttttgttctcatctaaatgtgcattttctgactgtatagaagaagctttggtatgtaatttaataataaattagaaatctaaatgattgcatttgtaattgtttatattgaaacagtaaccatcaaggtagtttggggatagagattatggtatctctggtgttgataagtgtttctcatgatgtcctgaaacccaggatgaaataatacaggtgctgaaaagctgtcacatgtcattcagaaaccatcatatgaacagtccactagtattttagccctagaagtgaaggggaatctcttaacatgaaacttcaggaggcataatgggaatctacaattgtagaattggctgggtgcagtggctaacacctgtaatcccagcagttcgagaggccgaggcaggaggattgcttgagaccagggatttgagaccagtctgggcaacacagcaaagaccttgtctctacaaaaactaaaattagccattcatgatggtgtgcacctatagtcccagctactcggaaggctgaggtaggaggatcatgagcccaggaggtcaaggctgcagtaagcaacgattgtgccactgtactccagcctgggtgacagagaccctgtctcaaaaataaattaattttttaaaaatcgtgtactgctgggctttagtacattagttgtgcaaccagccccactgtctaattttagagctttgcaattaatccagccagtgatcaattcctcttctataaaatggtgataaggatggctaccataattgtgccctgattatattgtcagggttatgtgaggaaatgctcataagcatctcagcaaagccaggggtacagggctcacctgacataagagatatccttgggtttgtcctaatagcgagaaaccgggcctcttttgcctctttttttccctcttgctgatgtgggagaggagagaacattcaagaggtgatcagcagacatccttaattttgataaaggcagctgagcggggaaatataaggtcggttctgtgtagatagacaggtggaacccagcaatcagtttaaccagcctccaagcggttctgatgcatgccagaggtggagaaccactactctagagtgtcacgctctataagtacacacattctatttagtcattccattctagaccgatagcttttatttttagtttggaactattacaaattgtgctgctctggacattctcgaacatgggttttgggacacacatgtacacttttctgttgcttatacctaggaataagattgttggattataggtgatgcacatactcagttttaagatatgttgtcagacatttttccaaagcaattgtgccaatgcccgtgcctaccagtaatgtgtgaatattccatttccttcacatcttcagcaacacttaatgatgccagtcagaatttgcatttccctgatagctaacgaggttgggcatttttacatgcttgctagctgttaggatatctttctttatgtaatatcccttcagatgtttgcatattgattaatccgactgtctttttccagttaatttttcctttgttgaataaatatgttgcaaatataccttcccattctgtgacttgtcgtttattttctttcctcttttttttttttgagacggagtctcactctatcatccaggctggagtgcagtggtgtgatctcggctcactgcaacctctgcctccctgcaacctccacctcccagattcaagcaattttcctgcttcagcctccccagtagctggggttacagtcatgtgccaccatgcccagctaatttttgtgtatttttagtagagatggggtttcaccatgttgttcaggctggtctcgaactcctccacccacctcggcctcctaaagtgttaggattacaagtgtgagccactgcacccagccatactttcttttttctttttcttttttttttgagatggagtcttgctctgtcacccaggctggagtgcagtggtgtgatctcagctcactgcaacctccatctcctgggttcaagcgattctcatgcctcagcctcccaagtagctggaattacaggtgcgggccaccacacctggctaatttttgtatttttggtatttcaccacgttggtgaaataattttcatgtatttcaccatgttggtcaggctggtcccgcccacctcggctttccaaagtgctggaattacaggcatgagccaccatgcctggccttgttctcctttcttaatggtggttttgatgaagttcttaattttaatgtaattcaatttatcaatttttttcctttgtggttagtgtttttgtatcctgttaaggaatctttgcctacctccaatgccatgaagatattctcctttttttttttttctaaaagctgtattattttgcttttcaatttagaactataaatattgtgcaactaattactatgtatgatttgaggcaggggtcaagattcatttttccatatggatatgcaattgatccagcaccatttgacaaggtcatccttccttcactgcactggagcaccagctttgtcatgagtgaagcaattgtctaggtgggagtctttttctggatgtttcattcttttccattggtctgtttttctacccttgagaaaataccactctatctgaattactgtaattttacaataagtcctgatatctggtagtacaggtcctgcccatttgttctgtttcctcaaggttgtcttggctattcttggtcttttgcatttttatataaattacagaatcactttgtcagcttccaagaaaaacgtgctggattttgattggtattatactaaatatatagatcaattggaggagaatgaacatcgttacagtattgactccttcggttcatatcatgatatttccctccactgatttcaatcctgttaatgtttcagtactgctccacctgtctgccctccaggctggtgctggcctctgggatggaggagcttcaggtatacttggagaaagaaccccaggtgtctcctccaacccttcatgttctctccttgactgtggcaaggagaggtgggaagggaagagaccaaataggagtcagaggaaaggaggctgcagtaacccactgcaccttggtacagggtcctgtgctggagaaatctagagatgataaaatatgtaaggaaaaaaacacaaggctggttacaatcatactgggtagcagacaatgggatgtaaaggagaaagaggcctggacacttgggcaagaagagagcttagtatgcatggattggacaggactggtcctaaaactaccttcatcacaaaaaagctgcatgtccctggagaagactcccctcattgggcctctttcctcaccgtgaaatgagaggacttggacctgatgctctggatgcttccttcagctctgccactaggacactggtactgatggaggatgatggcaagaagctaggttgaatgtaagtgacttgccctttgccctgtccctccaggtgtagtctttgaactctaaccatccacgcactcttcctttccacagaacagatccctgtttcaggctgacttcatcccgctggatggaattccagccaatgtgatccaaagagggaagcagtaccaggctgcagccctcgtcatgctgaagatggagcctcctgggaagctgctacccatggtcatccaggtgagggccctggacctccctgcctacactgtgctctgttcattttaacctctgctcccagggacccagcctcctgccttttggctcccaaagctacccccactcagcaggtccagtccttgtgttcagccacccagtgactgcttgctgtcttgtccttcctcacctggaactaccttctgagagtcataacggcatctcttggttctcatcctgaggctactcaacctctttgtgacctttgaatctattgaacattccctctttcttaaacatgttttctccttttggttttaatgatttttttttcactcctattgttcacacagtgagtggacagggattgtcagttatctcatacatccagcttctccttctcattccactatcctgactcagaccctcatgacatttctcccaaagcactgttagccttacttggcttccttctaccattctctcctgcacttaacctatcattgtattcacagggcaccacagatagtgagaggcagggtggaggggtcttcattcttcatactacctggaaggcaataatcttacattagccatatgttccccccggaacactcagcatagcatcatccatatggggagaggtgaataaatgcttaattcttcctccttctggcttcaccctcccagcttcagctctcccaccccaatactgttcctgccctcaaatcctttgcttgcctggctcctggctaaatcctggatctgaaactccgattccaactgcacaagctccgatactatttgctgaacactcatctcgtagctgaagtcattgctattgtcaccataatgtgcctcccacgtttgcgccctgtcttcaaggtacaagctccaccactctccgtgtcccaaagcaacaacccaacagctgcctagttttaaagaaatctgaggcacctgggacaacatgtaaacagagctgcttgaaatttcacaaacatccatatgatattacagcagagaatcttcatggcaatttgtaaatggaggcgagaggagatggataattgagccagggccttcagccttgtgattgtacttttaatgtctaaattaatttaatgtaagctaattatagactcacaggcagttgttagaaatactaaagagatcccatctatcccattaagtcaagtcacttagcatttatccagtacatactgtagggtggttctctgaaattctctagtagtgggtcttgagtagagtaggaatacaaatatattaagcaaaagtgttgcatctgcattgggagatttatcatttatcatgaaagacaggcagtacatatgagaaaaaaacaaaacagtatctgtgatatggtttggatgttttccctccacttctcatgttgaagtgtaatccccagtgttggacgcagggcctggtggaaggtgtttgggtcatggcttcatgctgtcctcctgataatgagtgagttctcactctgaattcacacgagatctggttgtttaaaagagatcttgctcttgctcttgctctcctgctccctctctccatgtgacgtgcctgctctgctcccccttcaccctccaccatgattgaaagcttcctgaagcctcactagaagctaagcgatgccaacatgcttcctgtacagtctgcagaaccatgagccacttaaacctcttttcttagtaaattttcccgtctcagataatccctcatagcaatgcaaaacagactaccacaatctagaaacagagtttgagatgaagagaaatagctgtaatcactatagtatctatggagaatgttccaccacaagtggggagtctttaggtagaagaccaaagggcaaggcgagcagcccagcgggtttctcatacctgactaaggagagaggtagataaagacattagcatggcagtgacaggaggatggaagagaaaaatcaaatacrtggtgatgggggaagagtagctgcagcatgcctgtgtccaagatggaatggagatgtaagcttcctcaacacctaggagcctacggggggcatgttgtacttccctagaaatactaacattttacaaaacagtgagtctactatctattgcgaggcagaaagcagcaaagtaaaacttgtgcttgcttaaacatgttttcaaaatctttatgacattttatatatagaaaaagggagmaaaatgatataagcttatgaaccagagcagtggtcagaaacagtaaagtcaggagaaggaggcagtttcggggacaaagatgaggtgttctgttttagatgcatggagttcgaagagttggcaagatatgcaagtgagcgcctggcaggcaggacagctggattgtgtttctgctgctggtcaccacctccacccccaaatctggctattactagttgtggtccctctgggtctgagagaacatagataaggtaggcattaatatactttatggaatcttagayttgattgcgttcatgctgcctttgcctcaccacctggtgcccaggttgaataggttaagcccactctcacatctcagaatcccccttcactagttcagccctctgttcactcatctccctcgcataaccacttcctcctatggcaaacagctgagttgttgtcaagacacagaggagggctaagcccacaaatatcataaaagtgacctgtgcaggctctggactcagactgttggagtctgagtcctcagtacttaacaggtgtgtgtttcagggtcctcatctctgaatggagataacagaatttccattgtgaggttgttaagggattaaacgacaggacaggcagtgtgactcaggataaataggagcgataggygagtctttcctattactatgtagcaatatgttattattgttagttgtttatccttgggtatgttgttattattttttattcttttttttaccttcagccaactcactccatgttgttgttattagttgcttatcctgggtatctacccacttcatctggactttgggttttctatgacattcaccatctttccatggagttttccaggttcaagccaacgtgagctgctttgatatctttgcctcaagagtattctttgggccggtcccgtgtgtccggcattaaagaccttagatagataccaatggcataaatcctgcatatgaaccagttgaaaatgaaaacaaaatagttctttttttgtttttttagagacagggtattgctctgtcacgtaggctggagtgcagtggcacaatcacagctcactgcagcttcagcttcctgggctcaagagatcctcctgcctcagtctcctgagtagcttagtctagacatacaccactacacctgtgtacctggctaatttttaactttaattagggacagaggcttgctgtgttgcctaggctggtctcgaacttctggcctcaagtgatcctctgccctggcctcccaaagaactgggattataggtgtgagccaccatgtttggccccaaataggttaagaataaaaaaatgaatgcgagaatcagggaccccttttttaagagtcaaagaaaagcaggaaagaggaaacctaatagtatctaactgggggccagggaagatttgatgagaatagcttggctttgctccatgaattctgactgaagccaccgtactcaacaccacttcaatataaacaataagagtaagatgatcagagattggaggaacagctttgaaaataagcagaggctagtttaagctataaggatgtgaatgatggaggaggtatataaaaaatcaaacgttaaggggctgattcttaaagggcagctgtactcaaggtggaaataatagaggtaatgataacagctgctatttgaggacttgtgtacccaaggcactgtgctaaaaatgctctctgtacatcacggacataaacataacgacagtgcctgaaataagagacctggttatcacctcccactgacagataaggagattgacactgggagagtttattatatcgccaagtatcgaaattagaggtgaacatggactcaaatccaggtcagtctgactctggggcattacgcacaaggaagtcggagagcgcgagcgtgagtgtcagggcagcagcagaccagtctgtcaaggcagcagcggggaggaaagcatcgagaggagaaggctccatgctgtgtaatgggccctcccaggaacgagccaagcatggtctccacccaccacccctccaatctcctcgccagctcctgatctcccatatctactacatcatggaaatcaacatctggacctgatcccaacacatctcagatggtggaatatttgctagggtaagaagggaatggggcatgaggccacctaatcatccaacaatctctgtcctgccagcttcaagatctcccaggccaacctgtgtgaacgtcctgaagcttaagcccctgagccctatcccttttatagccatgactttaaatatgaaaaccccacctctgaaccccctttatagcatgtcctcattctccanctgtgctcccatccctcaagacctgtcatctctcttgtcccaggcagtgagcacaggtggagggggccatgtgcagttgctccattgggcagcggctcagctgacctgctgctccctctgttgtcctgatgacctggctgcctgtggcctgctgggactcccacgtgctgtccatacccatgatgctttaggccctgggagattattacccagtaggatgtcctgaaggcacrtcttgtgaggtctatccagatatactgaaagcattgggcagatgtcacagaaagaggaggagaggtcagaggccgggcctcctgctctccgaggctcagcgccttctcccctgggcaggtgtgtggagatcgtccacctcytccaccaaagggatgacacggtgagggtggaccctgagctgcaggcctgggatcaggagatcatggaggtggggctgtgccaggcccaggaccgaggtaagatctgtcccagagataggagctcctgggagactctgccagggacccttcccagtgctgcccttctggggacaggaccccaccctctcctcacacctcccttcctccacacaggagagcatctgcatcccattcccacctccccagactcaggacacttctagagacctgaggactgtcctcctcggagaccctggccatcaaccctacccccaccccaccccagtcacagatgcccctgagctgccatatcctggggcccaaccaggccagagccacagctgtgagggggtctgccggtccctgctggggctcatgttctcacttcacgtttgtctgctttttacctaaggatgcaaacagggagattttcccttccaaagctcagagtgacctaccttggctttccctcccttcccctcctgcctgctactgtccagcacacacgaagggcacagacctgctgcacccycgcagcagtgcaaggccagctctagaggccatctcaatactgtatatgctttggctccaacctgaactcaatgccctgacgcttgggtcagtcccttccctaggatctagctgctaccttttgtccccgcccactgcatttttatttatggagaagacatagcctttcttgggcccttcccaggttcattttcctctctctcgcacacatgggccagccaggattgtttcaggtcatccttcagcttctctcccttcatccttcagagcaacaccttgagtcccaccctttgcctgtgtgggaaaacgcaaacacccactggccaggccccggggaygcccatatcaataaattaacccctgccttaaaggggagtcttgccctggaggacctggggctacaccaccttacccatcccaccccaccctttgggcccttcaagaaccaaactttctccatatattttttttttaattgatcattcttgggtgtttctcgcagagggggatttggcagggtcataggacaatagcggagggaaggtcagcagataaacaagtgaacaagggtctctgattttcctaggcagaggaccctgcggccttccgcagtgtttgtgtccctgggtacttgagattagggagtggtgatgactcttaaggagcatgctgccttcaagcatctgtttaacaaagcacatcttgcaccgcccttaatccatttaaccctgagtggacacagcacatgtttcrgagagcaccgggttgggggtaaggtcatagatcaacaggatcccaaggcagaagaacttttcttagtacagaacaaaatggagtctcctatgtccacttctttctacacagacacagcaacaatctgatttctctatcttttccccacatttcccccttttctattcgacaaaaccgccatcgtcatcatggcccgttctcaatgagctgctgggtacacctcccagacggggtggtggccgggcagaggggctcctcacttcccagaaggggcggccgggcagaggcaccccccacctccctcccggacggggcggctggccgggcgggggctgccccccccacctccctcccggagatttttttwaattttattatttttatttatttttgggatgaggtcttgctctgttgcccaggctagagtgcagtggtgtgatcttggctcactgcaacctycacctcctgggttcaagcgattcttctgcctcagccttaccttgaccaggctggtcttgaactcctgacctcgtgatccacccgccttggcctcccaaagtgctgggattacaggtgtgtgccaccacgcccagccactttctcgagttttctaggttctttcttttaggcaacccatgccccaaaagaccrttatttttctccttggctctcttctccccatgaaatagccacattagagattgtacaatacatatttacacataaactttaacctctcattccccatttctcttgcgccatattcaatactctttttacctcaccattctgtcatcacctgaggaaaaggcaatgtgctaattttctttaaatttaacttttatttttaagttcaggggtacctgtgcaggtttgttatataggtaaacttttgtcacaggggtttgttatatagatgattttgtcacccaggtattaagcctagtacccattagttatttttcctgatcctctccctcckcccatcctccactttcccataggccccagtgtctgttgttcccctctatgtgtccatgtgttcttgtcatttagctcccactttaagtatttgttttgttcccacgttagtttgctaaggatagtggcctccagctccattcatgttcctgcaaaggacatgatcttgttcttttttatggctgcatagtagtccayggtgtatctgtaccacattctctttattcagcctaccattgataggcatttaggatgattccatgtctttgctattgtgaatagagctgcagtgaacataggcatgcatgtgtctttatgatggaataatttatattcctttaggtatatacccagcaatggggttgctgggtcaaatggyatttcttttgttaggtctttgaggaattgctgcactgtcttccacagtggttgaactgatttacactcccaccaatggtgtataagctttctttttttctccacaaccttgccaccgtctgttattttttgactttttaatagtagccattctgactggtgtgagatggtatctcattgtagtttcgatttgcatttctctaatgatcattgatgttgagctttttttcatatgattgttggctgcatgtattgtcttattttgaaaagtgtctgtttgtgtcctttgcccactttttaatggggttgctttttgcttataaatttaagtttcttgtagacgccagacattagatctttgtcagatacatagtttgcaaaaattttctcccattctgtaggttgtctcttcactctattaatagtttcttttgctgtgcagaggctctttagtttaattagatcctgtttgtcaatttttgcttttgttgcaattgcttcggtgtcttcatcatgaaatctttgcccattcctatgcccagaatggtattgcctaggttgtcttccagcattgttatagttcggggttttacgtttaagtctttaattcgtcttgagtaaatttttgtgtatggtgtaaggaatagatctagtttcaatcttctgcatatggctagccagttatcccagcaccagccaagtggttttttcatccccgctatgttcaattcaaatttatttaaccatggaacaattattttatttttatttttattttaccgtaatattttaccaaacaaawactgtcrwttgaaaggagcatttaacagagcatgcatgtcagatttatttgaggaaatttgaaaacaaatacgtatrtacgtctctcagcttccattgatgggagtagaagaaggaagtaaatgatatcaaagacacttagaaattatccggtaaaccagcaattccaatgaaatctacgtaacagtaatggcacagtcctgacacatgaatcacaaacttgcatgggacttcaaatggtagcacttaggtgatgatcctttaaatgaacaatagctacctaattttattatattttactcagatttctttcctttgtgtctatcatctagaaaatacaaaccaatataagccactacaatatacatatgattaataaggtagaccttccagtctataatggcaaggatcagtgttttgaatagtaaagagcaaagtggctaatatttctcacttatcacttgaaggggcttggttcatgcgggttctacaggactcatctttctctacattgttcattttcaactaggaatgagtgtcacttactgagatttaaaatttttcttttaaggactaggatggtcctctttttggctaagtgaccttgagcaagctatttaatctctgagttctggtttccttatctctaaaatggatgtattgcatgcccccccccaccacacacacacacattcagawttttgagaccaaataaataatgaacgtgacattgttgaagtgtgggtagtacagtyggcrtaagatgattgttatcatatgccccactctacaaaaactacctccccaatacgcatgtggagtaggagagcccaggccctgccacatgatggamgtcattaaattctctgatgcccatctcacatgtaaattgagtggaatggaatagttgatttccagtttccttactgtctttgacatgagtctaggacctctctatttctctacattataatccagatacctaaaaccactgcctaaaacctcctgggaataggagggcatgcttcggtattcttaactactttgggtgtcagagacagatttcactgaaataaaacaaacttacagaaaagttgtataaatcctaagtgtacaacttgatatgtttttcctaaggttacaracctatatgattagcactcatatcaatcaacacagtactagcagctttcccagaagctccttgtattttctcctagtcttttgatccaaaggtaaccactgtcctgatttctaacagygtaggttactttttaatttgacataaatgcaaataaaaacactcactcacctgtgcttggtttcattctctaagcaataggtttaagatttacccacattgttgcagatagttcttcattttcattttgtgaagtatcccattatataagtatggcacaatttattatttttttctgctattgatggacatttaggttgtttccagttggaggctaacaacgtcagtgcagctatgaacatggttgtatgtgcatttctgttgggtatatacttagaagtggaattggtagatcataggttatgtgcatatacacttttagtagttactgacaagtttcctgaagtagttccagcaatttccactttttccagaagaatatgagttacagttgcttcacatcctctcaaatacttggtgttttcttttcttttcttttcttttttgagatggagactcaccctgtcacccaggctggagtgcagtggcatgatctcagctcactgcaacctccatcttccaggttcaagcagttctcctgcctcagcctcctgagtagctgggattacaggcgcctgccaccacacccagctaattgttttgtatttttagtagagatggggtttcactgtgttggccaggctggtttcaaattcctgacctcaagtgatccacccatctgggcctcccaaagtgctaggattaaaggsgtaagccaccgcgcccagccatacttggcattttctgtcgttttcactttagctgttgtggtgaatatgctgcattatcatgttgtgagttgaactyacattctctcaatgaccagtggatctgagcaccttttcctaggctgagtagccacatggacatcttcttttgtgcagagccctttaaaatcgttttgcccattttccttttgtctcctattattccctcattttaaactgttttttaacagggaacatttgaccaccacacagcctctcagatttcctcatccttcaaaatctaccataataatcatagctataaggtactgaggggctttatatcatcatctgatgtataaggtaattaatattatccccactttcagaggcaaatgttgaggctcagacagagtgagcaacaggtccaaggggatgcagctgggcagcagcagggccaggactgtacccagagctgaygccacagcctgtgctccgaccacagcactccctgctttgcagatgattgtcattgaggcttgctcccttaacgaaattaccagcgatcatctctgactgttcatatctccttttgctgctttatttctattcttatccctaacatactatgcrtaactttaatttttaatgattctatatatgctctttcttctctattagaatctaaattctgagagggcggggatttttgttacttttgtatacccacgtattcccaatgcctagagagtgcctggtacatagcagttgtatactttttgaataaatgaataaacactcattaattctaaggcttgggtgtcccaggacatgaggatttatttttatatcccctctggggctgcagaytgtaaacttggctcattcttctcctaggtttccctgtctccttccagtctcgagctcagctctgccgtttcctcgccatgtgaatcttcacatgcaccccccaccatgcagccatcaaccagggccagccgtggataaacaaaagcctgcatctgtcagggcaggtgtctggactgggggttcttgaaagagacagccgggggctagtgtccacacatcaaggttcagggtgaattcaggttcctcttctagcttgactggtatgcctggatccctaatggcccgtgctcagtgaggatgccctcacccaccaccaaacaagatgcgacaaggcccacartgatgaggtcactccctgatgtctggcaatcctatgttcaaataagcatcatgtggcttctgagctggcggcaggtggacgtggtgagaggggacctctgagactacagaggagatatcagggtgcggggatggattccgggtccctgtgtcttggaactaggagctcattcatcctcttttctgccccaggtacccccttgagcatcagaaagtatatgtctcaggccctgagcccaaagctgtgctgagacaatttcaaacagatctggacaacctggaaagggaaattgtggcccgaaatgagaaactagaccttccctatgactatctgaagcccagctacatagagaacatatcactatctgagatcaaatattctggtcctcaaagaccttaggccatcattactatgaacattttcctcctgaatcttgtcttttcttagctctcagttgctgtgtttttctttcctcctctgatttttctacctgagtatctcattagcctgaggcactgtacttaccttcagggaccctatgagaacgatctgcacattgcaatcacattccttagagaaatcacccatatactcctgtagctttcccttggccctggaaatttacctactccattcatcatagaatgtttaggagtgattatctatatggcacgctatagaggtgcaatttcatttctttctatctggataatcagttatgccagcacagttcatagaaaaactcattctttcccactaatctgcaatgctgacattaatcaaattcctgtatacaaatgttactactggaactgtccgttctgctacattcatcagtttttccttccctgcatcacagtgatgtaagtactatgggtttatacctaacacagcctactatttgataagacatactcatccaatttgttctttccaggtgctctggcttttcttaaacatataaatattacaattattttgttaagtttcagaaataacggatgatgtgattttgattggaatcacattgtatgtatagaaattttaatacaaaattttcgcattacaaaaatgtcaacttcagccaagtttgcatttttgagatatatccaagtgggtccttttatgtattgtgattccatttgttttttgtttgtttgtttgtttgcctgtattgcatctgggttcctgggtaagattggcctatgaagggttatagacttgtagagaggcaatatcaggaactctgctaaaatgagttcattaaaataatagtgaagaacaaaatacagaattctgtcactagagactcaaatgcatttgctgaaatcatgtacagttgggcctccacatccctggattcaacctatcatggatggaaaagattttttaaaataatggttgcatctgtactgaacacataagaccattttttcttgtcattggtccctaacagtgcagtttaacaattcctggcatgccttgttttattgtgctgtgatctcttgtgctttccagatattaaaaacacagtttgcaaattgatagtgtggcaaccctgcctcgaggaagttcttcaatgccattttttccaacagcatgtgctctgtgcctctgagtcacattttggatatttttacaatgtttcagacatttttgttgtagttctatctgttatggtgatctgtgattgatgacctttgatgttacagttgtcactgctttggagctccatgaactgtgcccatctaagatggcaaacttcattgataaatgttgtgtgtctgattgctcctccaaccagccattcccccatctctcctattttccttggccctctctcttccctgagacacaacaatattgaaatctggtcacttaataaccttgcagtggccactcagtgttcaagtgaaaggaagagttgcacatacctcactttaaatcaaaagctagaaatgactaaggatagtgaggaaggcatgtctatagccgagataggccaaaagttgggccccttgtaccaggtcgctaagttgtgaatgtaaaggaaaagctcttgaaggaaattacaaatgctaccctagtgaacccataaatgacaagaaagtgaaacaaccttattgctaataatggaggatgtttgagtggacgtttgagtgttctagatagaagattaaccaatccacaacacttccttaagccaaagcctaatccagagcaagaccctaactctattcaattctatgaagacggagagaggtgaggaagcttcagaagaaaagtctaaagctagcagaggttggttcatggggtttaaggaaagaagctgtctccataacgtaaaagtgcaaggtgaagcagcaagtgctgccgcagaagctgctgcaacttatccagaagatctagctaggatcactgatgaaggtggcgctacactaagcaagagatttttatgtaaaccaaacagccttctactgggagaagctgccatctaggattcccacagctggataggagaagtcaaggcctggcttcagagcttcaaagaacaagctgaccctcgtttcaggagtgcacgcagctggtgactacagttggaatctggtgctcacttaccattccaaaactaccagggcccttaggaatgaagctgaatctactctgcctgtgctgtttgagtgcaacaacaaagcctggatgacagcacttctgttaacagcatggtttgcagaatagtttaaactcactgttgggacccactgcttggaaaatgtagatatacctttcaaaatatcctgctcattgataatccacctggttacgcaagaagtctgataaaggtacacaaggaggctgatactgccatagatagtgatttctctgatggatctgagcaaagtaaattgaaatcttctggaaagaagacaacattctagatggcattcatatcattcaggattggtaggaagaggtcaaaatatcaacattaacagtagtttggaagaagttgattccagctctcatggatgacaagggattcaagacatcagtggaagaagcaactgcagatgtgaggaaatagcaagagaactagaattagaggtggagcctgaagatgtgactgtattgctgcaatctcatgagaaaactggaacttatgaggagttgcctcttacagataagcaaagaaagtggtttcttgagatagaaactagttgtggtgaagacgctgtgaacgctatccaaatgataaccatagatttagaatattacatgaacttagttgataaagcagtggcagggtttgggaggattgactccacttttgaaagatgttctactgtaggaaaaatgctatcaaatagcttcacatgctacagggaaatctttcttcaagggaagagtcaatggatgcagcagacttcattgttgttttaagaaattgccacagcacacacccaccttcagcagtcatcattctgacccgtcaacagccataaacattgaggcaagtccctctaccaacaaaaagatgacaactcgctgaaaaaaattttagtgtttttagcaatattgttttaaattccagcttttatttaagatataggggggtacgggtgtaggattgttacatgggtatgttggatccgggtagtgagcctagtacccagtagatagtttttcatcctgtaccctcccccttccaatagtctgcactgtccaattttcccatgtatttgaccacatgtgctcagtgtttagctcccactctcccacttgagaacatgtggtatttagtattacgttcttgtcttaattcacttaggattacggcctccagctgcatccatgttgctgcaaaggacatgacttcattcttttctgtggtggtgtagtattccatagtatacgtgccacatttttcttatctactcaatcattgacagacacctaggttggttccatgtcttccctatagtgaatagtttggcgatgaacatatgagtgcatgcatctttttggaataatgatctatattcctttggttatatacccagtaatagtacttctgggtgaaatgttagctctgttttaagttctttgagaaaactccaaactgctttccacagtggctgaactaatttacattcccaccaacagtgtgtaagcattgcctttgctccatggtttcaccagtgcctgttgttttttggctttttaatagtagccattctgtctagtgtgaaatgggatctcatgtggttttgatttgcatttgtctaatgattagtgatgatgggcattttttcatatgcttgttgtccacttgtatgtcttctttagagaagtgtcttttcatgtcttttgcccattttgtagtggggttatttggggtttttattgcttgctgatttgttcaagttttttatagatttggatattaggcctttgttgggtgcctagcttgtgaatattttctcccatggtgtaggctgtctgtttactctgttgatggtttcttttgctgtgcagaaactctttattataaagtgtataaaatttataatcaataaatgtacatttgccgattcaataagtcaatcacatttattgatttacaacataatttacttaggtcccacttgtcactttttatttttgttgcaattgcttttggagacgtagccaaaaattctttggcaaggctgatgtagagaaggatatttcctaggttttcttctaggatttttatagtttgaggtcttatatttaaatccatggtaggatagcacctccctgtccctttgaagtgaaccatgttacctgctgtgagcagtgaagtggagcagaagtcacaggtgccatttctgggcagaagctttgaagggaccatggtgagccaccccatcatttcttctgcctaagcagttttgggggcacagaagtcgggtgttatgggctgaattgtgtcccccacccccaagttgatacgttgaagtcctaaccccaagtgcctcagaatgggattgtgtttggagatgggacctttaaaggtgtaattaaggggaaacgaggtcatatgggtgagccctcatccaatctgtctggtgtccttataaggagaggagatgaggacacagacacagaccgaagaccacatggagacacagacaagagggtggccacttataagccaaggagccaggccttagaagaaaccgattctgctgataccttagtcttggacttctgggaccccgaactgtgagaaacaatatttctgttatttaagacctccatctgtggtatattcttaccgtagccctagcaaactcgtattgatttttgataccaggaagtggaatgctgctctaaaaaatacgcaaaaatgtgcaagtggataatgagtagaggctggaagagtttggaggtgcatgctgcaaaggcctagatggtcttttttatatgtttaatttctggtcaaaaatattttagttgttttatagagttctgggaaaataattacctaaggaaaagaaatagcattgcttataggcgggtttgaatattagccctgtagctttgctgagaaattgagaaattcttcttggttagagtcctgaattacattaaatggagggatagggttaaggtgtttattttgtgttttttgctttcagcttggtgtttttggttgttgttgttgccccaagtgagtccaaaacccaaccgggaaaagaacattaaatcttaaaacttgagaaccttctttgactccatggcccatgttccagatatactaggatgtggttgggcggcccagggcttcaggtggctcttcccccatggctttgctgggtgcagcccaggcagcagctctcacatgttggagtttgatgcctgaggctctcccagggtggacttgcacactgctggctctaccatcctggaatcttggggatagcctcttccccacggctctgctgggcattgccctagtgggaacgttctgtggtgtccctgcccctgtggcagttttctgcctgaccccaaggctgtctgggacatactttgaaatgcaggtggaggcagccatatcccacagctattgcactctgcacacctgcagaatgagcaccacgtggatgctccaaagagttttctgcctgtgtcctctggaggggtgatagcatgtcccccactccaccagggcccattgagcaacacttggagcagccaaggagcaccacagcacagtgtgggaaccagcgacttcagggagtgctgggcagcaagccccaaggtcctcaggggtcctcagggcgccccagggcctttcttggaaaccgtactgccgtcagtgccctggcaccatgggcctgtgacgagagtgcgg

SEQ ID NO: 94416 - DNA, 61486 bp, Homo sapiens
  misc_feature (1)...(61486): n = A,T,C or G
attgagccatcgtcttgctgcagcactctagcctgggtgacgcaggagaccttgtctcaaaaaaaaaaaaaaaaaaaaggaaaagaaaatgtggtacatatataccatggaatactaaacagccataaaaagaaggaaatcatgtcctttgcagcaacatggatgcagctggaggccattatcctaagtaaattaacgcaggaacagaaaaacaaatgctgcatgttctcacttataagtgggagctaaatattgggtactcacggacacaaagataggaacaacagacactggggattccaaaaggaaggagggtggagggggtcaagtgttgaaaaactacctattaggtattatgtttgctgcttgcgttacaggatcattagaagcccaaacatcagcatcacacagtatacccttttaacaaacctgcacatgtaccctttgcatctaaaattaaaaaaaaatgattagtcagcagggttggtgtcttctgaggcctttctccttggcttgcaatggccaccttctcactggtcctcacgtggccttcccactgtgtgcatgcactcctggtgtgtttttctgtgtccaaattccctcttttcataagaacaccagtcagattagggccaaccctgatgaacccaatttaacttaactacctctttaaaggctctatctccaaatataggcacattctgagattcaaaattcagtatataaatttgggagcagggagtggggtggtacaattcagcttctaatgtcaatattccacacttcggtttaaggatggtcagacattattctcaaccaacttctagggatttagatgagctaaaacaaaaaagctcctcaaatgtccaagtcagcatgtcttggccctggagaataagattagacttttttttttttttgagacggagtcttgctctgttgcccaggctggagtacaatggcacagtctcagttcactgcaacctccgcctcccgggttcaagcgatgctcctgactcagcctctggagtacctggggttacaggcgcctgccaccatgcctggctaagttttgcatttttatagacacaggatttcaccatgttggccaggctggtctcgaactgctgacctcgtgatccacaaggctcagtctcccaaagtgctgggataacaggcatgagccacctcaccggccgagataagatcagatttcaaggtaacctggggaagctggagaagtggatggaagaaaagaacactacctgacattttgtttatttagactctgctttcttccataaagaacatgaggggagggaactcccagattaataaggacataaagtctgtcctgactgtcctttcaccttctcactgccactgccctggcttcttgggccctgacccaggcactgtgcatgtggccttctggtgaccagagcctcaccagaaggactgtgccctagggtggggggtggggaggggtagttaagatacagtttttcaaggcagagtgcagtacgctaggggcttaaggaaagttcatgtggcttccagggcctctgaaggagacagtgtgcagactgtggtggaggccagctggggaagaatattttacatctccacagagagtcatcattgacgcatgagtgatacgcattattcattagaaaaagctgatttctgccgggtgtggtggctgacttctgtaatcctagcactctcggaggccaaggcggggtggggagggggtggggatcttttgagcccaggagttcgagaccagcctgagtaacaaggatgacaccccatctcttccaaaaaaaaaatgaaaattagctgggtaatttaggagtcttcctaaggatataataaatatatgtcttttttcttaggcagcagatggtggccagctgttctcttattactgatgaccaaacatgaagaaaaaaaattgtagtaagggggcttataataaatataagacagaacttaataaactaaatctggatttttatacacacaaaggaaaatgggcggctctggaaaattatcaaattatccaagccaaaatagcttctccattatctatgtaacaaaacattatttatgtggattgaattgtacaaataattgtctaatattttgggtctctgagtagacaatctgggtggtcaatgatacagattgagggcccttcaaggaatattttagaatgggaaaagcgttgatgctctttgccatttgactgggggcatttctactgagatgcaggtgatattgatcacatttgtagatacacgattctttgaccaggatttgggcccgttacagtaaaatcgtaacaatttttgcttaatgtttgaaatcaacttttaattgcaaaaataatgcactctttcctctaaattttcttttctttcttctttttttttttccgagaaggagtctcgctcagtcacccaggctgcagtgcagtggcgcaatctcggctcactgcaagctcagcctccggggttcacgccattctcctgcctcagcctcccgagtagctgggactacaggcgccctccaccacgcccagctaattttttgtatttttagtagagacggggtttcactgtgttagccaggatggtcctgatctcctgacctcgggatccgcccgcctcggcctcccaaagtgcggggattacaggcttgagccaccgcgccccggccactttcctctacattttcttttctttctttctttctttttttttttttttttttttttttggatacgtagtctcgctctgtagcccaggctggagtgcagtggcgcaatctcggctcactgcaagctctgcctcccgggttcacgccattctcctgagtcagcctccccacagctggggactacaggcacacgctgccacgcccggctaatttttgtatttttagtagagacggggtttcacagtgttagccaggatggtctcgatctcctgaccttgtgatccgcccacctcggcctcccaaagtgctgggattacaggcgtgaaccaccgcgcccggccatttttttgtatttttagtacagacagggtttcaccatgttagccaggatggtctccatctcctgacgtcgtgatccgcctacctttgtctcctaaagtgttgggattacaggcgtgagccaccgcgcttggcctatttttattttttgagatagagtcttgctcgtgtcacccaggctggagtgcagtggtgcaatcttggctcactgctaccttggcctccagggttcaagcaattctcctgcctcagcctccctagcaggtgggattacaggcgtgcaccaccatgcccagctaattttttatttttagtagagaaggggtttcaccatgttggccaggctggtcttgaactcctgacctcagatgatcctcctacctcggcctcccaaagttctgggattacaggcgtgagccaccacacctggccgaacagatatttattaaacacctattgggtgccaagcggtatgctgattgcttgaggctacccacactggtgcataaatgaccagtctttaataataatagcaaacacatacgttccaagcacaagtacattaacccatacaatggttacaaagaccactttacagttgaagaaacaggcaaaaccggttatttttaacttgctcaaatccacacagtaaggaagaagagaggccaatattttaatttaggaaacctggctgcttcaaagcctcatgctgttaaaaaccacactacgctgccttaagatatgtcatttgggaaagaaagttaactctttttccagttgtttagataagctgggatctatcatgaaagtttatctaaagatataactgagcttccagatggggtgacagtaccaggagcacaggcagaggtgttcagaaaggagaactgggaagaggcggaagagacattttgccacttctttgtttgcttggtgttggaagtgaccgctaatgaaaacctgtcatgaaaatcaacaagagaatgcatttcttttaaagtaacgcattcacagcacaatcttaagtgcattctgaagtcctgctgtctttttttttttttttttttttttgcgacggagtctcactctgtcgccaggctggagcgcagtggcgccatctcggctcactgcaacctcagcctcccaggttcaagggattctcctgtctcagcctcccgagtagctgggattacagacacctgccatcacgcccaactaatttttgtatttttagtagagacggggtttcaccttgttggtcaggctggtctcgatctcttgacctcgtgatccgcccgcctcggcatcccaaagtgctgggattacaggcgtgagccaccgcacccggcctctgtcttaaacatcataaaaacataagaacccaaaaaagatggaggggagtgcgcccttagctgccccaaactggcgtggtgggaggcagggcaattggtctagttttctgagccgtaggattagggctctgggtgaggccagagtccctaaagttgtacccatatctgcgtgtttgtatttcctgtttgtaattcctcctgtttgtactttttgtctcttatacggtacacttaaagtttctccacaaggtgtttcagcataaagtactcaaaaactaaaaacgtttaatttcattattaggttaagtgtgtaaaaaatgccccatcaaggttcttgtacaaactcccattattctcccagactccgaagtggcactccagaataattttacgtgggttagcatcttttataaaacgggcaggcagagcggcttatgaaattaaccttggaaaccacgcggccactctttcgggaaatgcctcctatttatgtttacatgggccagcaagagaatccaaggttggaaaggtcattcctcactacagaggctcatcgcaatcacagttccgtctccaaattcgagttttgggtgtgaagagtttataaagtccagccgctgtcctcgcagtgtttggggttagcggagggagagcttgtttgcgaycaaacttgccgcgcggggcggccgcttgcaggaacactgcggccttgtgcgctcggcggtctgagctcctgcgaggccgagaackacgcctagcgcccagcggcctccgcgaacaaaaagcgaccggtcggaaggtgctggcccagccgcccctggcgctcgagcccgaatccggccacagaccatgaagggacgcccggcaccacgtgcgcggggatccgcggacgggacgctccccggcacctccggggctgggccggcaccgcacggtcccacccagacagtagctgccccgggcccccaaaacagccgctcctagctcctccctcccagctctgcggtggcccaagccgccctccgcgcgcttgacccagaacagtacggagttctgcacgagccgggggtggggcctgtctcagcgcgcggcggtggggcggggcttggacacgggcccggctcaacttgagggaggcggggctcgaggctcagaggagttggagcccgctctgcgcgctgcgggacggggcacggcggagcagggttgggtccgcctcgagcggggagggtgatgctgcaccacaggggcggggctggaggtaaagcgcggagcggagagggaccaggctcggcactgatttgtgttcagggctagcccagaggggcggggccaggtacggggcgcagccgggagcgggaggggcggtgcaggacggggccgggcacggcgcgggaagaggccaggagcagcaacgggtgcggggcggggccgggagcgtcaaggggcggggaagaggggggaatgggcggggccgagctctgcgaggggcgaggtggggaatgcagagcggggccggacgcgggagcagggagctgggcggggagcggggcggggagctgggctgggctcggcacggggcggggcggagggtggggagcggaaagcaggacgcacggctcccgcggcccgctggctgcccttcccgccagcgcaggtgtgggacgggcggcggactaggcacagagctgcgggagcaggcacagggagtgtggagcctggcggcgggacggcgggatccggtgggagccggagtcccgccgaggggggctggaggtggaggggcccggcgaggccgcgatgaagccgagcggcgaggaccaggcggcgctggcggccggcccctgggaggagtgcttccaggcggccgtgcagctggcgctgcgggcaggacaggtgagcgccacggctgggctcggaagtccgggcggagcagaagcgcgtgggccttgggagccgcctggagtggcggggtcctggcgcgcagccggcgggcgcccagggtccgcacccgagggcgcggggcgcggagcggtgaaaggagcctttgtgctggtgtcctggacacacctcccgcgcccttctccaactcccggagccctggcggcgagcccctctgctttggagttcagcggctaacgtgacctttgcgtttgagtgagtggtcagaatgtagaaatctctccaggggtagcgtacggggctgttgatttttaaggacctatgaacggattcagctcgcggtaggaagcccggggctaagccccagccgcgtggggatctggctgggctgccgtttgattgtcctggctgcagcatcctcaacccaaacttactctgacccacaccctgaaagtggctcagctccgcgacggccacggactcagagttcaggaggaacttgttacactgcccggaaggatgaaaaccgagccgcagagctaccgaaaaccagcgagcagagtttaaaatggagtgcagttcctctcttctctttttcatttttgtgattgttccttccactttcctcagtacctttagcagtgcctgacacaccgacggtagtggtaggcaagcgagtgttggttctcccaggactgtaagatggcttactccatgtttgtctcttaggatgtgattgtgggccgggcgcagtggctcacgcctgtaatcccagcactttgggaggccgaggcgggtggaccacttgaggtcaggagttcgagaccagcctgaccaacatggtgaaaccccgtctctactgaaaatacaaaattagctgggcatggtggcgcgtgccttagttccagctatttgggaggctgaggcaggagaatcacttgaacctgggaggcgaaggttgcagtgagctgagatcgcgccattgcacaccagcctgggcaacaagaacaaaactccgtctcaaaaaaaaaaaaaaaaagtgattgttttcggggattttagagacaggaggtgtgctgagagcagattggccttttatattcaaacatttgttttcttttttgaggtctgacagtccgaaaatgctctaccagtttccctagatgttgaaatcggactgttatcaatcttaaatttgaagtgagtcgtcataaagtggatagtgctttaccttggtgcaaatcctctaatcctgtttaaaaattaatctgcaatactaagtagactcattttttgttgaagrgccttccttccctttgtagtttgaagaacccaagcctcagaccgtaaagaatgaatgaatttaagagtgttgcgaaactccaccctttgacctttccctcctgtaggaaaaggaggaccctaaaccttcctgcaaggcagatgaagcttgtagcttcagtgcaagcgttcttcctggaaagcagagctgctgtgtgcatggaacacgggttctccttccatccttccctgcctcccwgctttccttccagagcaagcatcagccagatatttaggaacttttaggttctactgtaaaacttttcttccttgaggcagtgaaaagccagcttaggattcagacattgctgtgtaaaccctggcgagctaagttaggagtttctgtggttttcaaatttagatccttgaagaaacagaagattttaaaattttatgttattatttaacaaatgtgcataaagagcttgcaatagagcaggaacagttctaaggctcctatgacttttaacttaagagatattttatgtttttgcaacttgccagcaacaaaaaaagctttttttaaacgctggagagggttgcaataaagatgctgccattaggagtcyggtcaggaagcccgggccgcccggggctccccctcaggcattatgctgatgcttcctgcctgccgggcagtgctgagggaatggcctgaaggtctgctgctgggacaaacagaagccacacgaggtcatcggaacctgtgtaaagagggacagattgtcttctaatgcaatcgggggctgactggagaaacatatcctttagccagatgacctggttcggggtgtaaaggtcgtgagtggtgatccttttggagttctccttagtgaagagcatgttgcgccaaatgtcgtcagggtcctcccagtatgtctcatcctcttccatctagtcactccatgctattgctatccatctcttggttgttgccgcttgtcttctctatgtctgtctcccgtggatgactgtgacgttctcgtcgttctctgagtatcgctggataatggtggatgggatgcctgtaatggagatgacactctcgcaagtagatgaaagggtgcactgtcctttctctcttagactggttccgctcaaggtggccctggagaaactgcttccatttcccctctgccccagttctggcaggcttccctgtcccaggctcccaattccctcacctgccccctccatgcttctgtgccactcttccttccgtgaccgtggggatcatccctgccctcctagttccagccacccacactgtgacgggagcctcctccctggctgttgggcttttggggagggagtgaccacagccccaccccaagtacagatgacagtattcactgatgtggatggttgtcatcttttgtgtgatgtgtgaacagaagtattgtagacagctctgcctttcaaatccccccgcggagctgaaccagcttctgttgggccagaaacttagacaatttagggggccctctttaagaaaatacaaactttgccagatgtggtggctgaagcctgtaatcccagcactttgggaggctgaggcttgtggatcacctgaggtcgggaatttgagaccaatatagtgaaaccccatctctactaaaaatacaaaaactgtggccgggcgcggtggctcacgcctgtaatcccagcactttgggaggccgaggtgggcagatcacaaggtcaggagatcaagaccatcctggctaacacggtgaaacctcgtctctactaaaaaatacaaaaaattagccgggcgtggtggcgggcgcctgtagtcccagctactcaggaggctgaggcaggagaatggcgtgaacccgggaggcggagtttgcagtgagtagagatcgtgccactgcactccagcctgagcgacagagcaagactccgtctcaaaaaaaaaaaaaaaaaacaacaaaaatcagtcgagcgtggtggcacacgcctgtaatccctgctactaaggaggctgaggcaggagaatccctagaacctgggatgtggaggatgcagtggtgagcctaggttgcaccactgcactccagcctgggtgataagagcgaaactctgtctcaaaaaaaaaaaaaaaaaaaaaagagaaaatacaaaattacaaattcaaacttagatataaaagttatttagaataagaacaatcacatctataaatttctaaggtgctaagaaatactgcaaatatcacgaaatacacaaaaataacaattctttcactgcttctcatacttccgtaatactttttgccctttttctggtttcatactgtttgcatcttttgaatgataatgattttgtaatactttatatggggagaatagaaagataaattcagcatttcctgttgcttggctkattgaaatttattactgataatttagaaaatttaggcttcaaacttgttactggtaacaattggcttataaatttttaggatgtcatcaaattgagaaccttctatgaatttttttatacattagttgtaagtgagtctgtttttcacagacttgctcctggctctgtgcagttgaaatctggtttatttttgtgatccacacattttcagtgccagtgtctgtgtccacctcatgtgctcctctggtcctgtatgtttttgtcaccatgccaggtgggtcggcgtgatggacaggggagtatgcctggaagccctttctacactggatggctctcagtaacttacagagaaatgtgactgcaaaccctattgaagcaaagttagttcatctactcagcttatctttagcccacactggctgtatccacgccagtgccacctgatgcaaagtctgatggaaggacagtttaagtggaaaggcacaaggttagatctacagtcaaaacagctgacttttgcccattacaaaaggggtttgtgtacggctttgtgaacactttgttagggtcccttgcaggcaagtgggggccttgatgcttaagcgtcattagcttcacaggaaattcatctctgtttacttgtaacaaaatctcaggacaaagcagaaaaagaaaaacccagcactgacctcaggaccgcagacttcccccttctctagttggccttgcacacccttgcaggttatgcttcccgaggcccggccttgcgaagtgagcctgtcgtccccttgtccggccagatctggtcgctctgcttggtgtttgcaaaacacatgttgtattttcttgcctttcttctggcctatggagtatgcaaaccattgcctgtctccagagcccggctcctgagccccttccttcatggaccgcttctcaggtggccttccctgtctttccagtgccccacctggtcctgctgagctggcactcctcatgactttatttatccttgcctggtggtgtgccctccacacagtgggtccttggaatatgaatactcttttgtctacctctggctcttcagggcagaaggcacattggtgggctctggaccygtgtccccacttgtccatctggctttaccaacacagtattgttttgatttgtgattttcctttttgctggttattcacaccgggaatttaatgagtgacgtaacactgaaagcacatgatgaagaacagcagcacctggcccacactcctcaccccttgtcctgtgtccggagtccctgttctcaattttctgagagttacacccatttctaagtaatatgcttctgtcgtgctttcttgagttgttcattgttgacagaattattctgtgttacgccgtgtagtggccctgcccgtgtggttctgtgggtgtccatgtccatgttcggatggccatgcagatgtaactcatggttcagcccggcagtgtattcctttctttctaatgcaacttgtattttcgttaaagaatgttttgttttgttttgctttgcatttgtctagttttctgtatacctattgtgagccatccatcttcccagcaggatttttcatgatctccttggtgtggtcacactccttgggtcgctgctgtggagcagtgcttctccagctttggctgtgttggaagcccaagagggcttattaaggcaaatggggtcccaccgcagggtttctcattcactaggtctggagtgggcaccagaatacgcatttctaacattcccagctgacatagatgctgctagtctggagtggcacaatgggaacttccgctgcatggtattttattatgtgagtacatcactattcattcaactgttttatttattatttatttttattttttgagacgacgtctagctctctcgctcaggctggagtgcagtggcgtgatcttggctcatcaaaacctctgcctcccgagttcaagtgattctcctgcctcagcctcctgaacagctgggtctacaggcatgcgccaccatgcctggctaatttttgtatttttagtagagacggsgtttcaccatattggccaggctgatctagaactcctgacctcaagtggtccacccgccttggcctcccaaagtgctgggattacaggcacgagccactgcgcctggcctcattcaactcttgagcaaactggataatgtccagtttgaagttaatacgggtaacgttgctgtgaactttcttgcacatgtcttttgattatgtgtgcatttctgttggggatttattaatagtaggagtagaatcgctgtgtcattgggaatgtaaattctgccaagtagttctctaaagaggatgtaccaagttacactccaccctgcagtgtgtgagggttcccttttccccacgtcttccacaacatgtggtatggtctgtcttttatattgtagccattctgatgggcttgagttggtattttattgtagttttaatttgcgtttcttagataattaatgaagttaaatgcacatgtttattggctttttttttttttttttttttttgagacacagtcttgctctgtcgcccaggctggagtgcagtggtgcgatctcagctcactgcaacctccgcttcccgggytcaagcaattctcctgcctcagcctcccragtagctgggattacaggcatgtgccaccacgcctggctaatttttgtatttttagtagagatggggtttcaccatgttggccaggccagtctcaaactcctgacctcatgtgatccacccrccttggcctcccaaagtgctgggattacaggcgtgagccactgtgcccagctgtttattggcttctttgatattatttgcttttaaaatgatggtaataacacattgattataaatttattcatccaacaaagaatcattaacaactcaggaaaggactttagcctttttactctgaatgtgaggggaggtttggggcagagtcttgtgtggggctttataggactctatataggggaccaccctggctgctgcatgaggtcctttgtgggacactagggagaccagaatcaggtatctgataggaagccacgtgagaaatgagggtggatttgactggggtgcatgaagaaggtggtgaagaagatttactttggaggctgagatgacagcctctgagttggatgtggggtgtgagagaaagagaggagccaagggtgacttcaggggtttaggcctgaaaagctggttgaatggatttgccactttccgagatggcaaaactgcaggaggaacaggtttggagctgagagtcgagtgttctcttctgtgcaggttaagctcgaattgccagtagatttcttattttatttttttgagacagggtatcgctttgtttccctggctggagtgcagtggtgcaatcacagcttctacctcctgggctcaagtgattctcccacctcagcctcctgagtagctgggactacaggcatgtgtcaccatgcctggataatatgtattttttaattttttgtacagacggggtttcactaagtggagatgttggatttgcacccaagctgacggcagagatgcagtgtggaagtcatattcctggagatggtatttagggccatgtcccggacaggaggagagcaggcttggccactgatgggctttgccgtcggatgagctcaggtcaggctcccattttcctccttgggagcctcacaaatgccagtttgtggaggtcatttctgaagtggttcatttctccagaaaaggcttccctgctcttcctgcctgggctgagcgcacctgtcgctggaggaagaggaggcaggagggggagaggaggcggtggtgatggcctccagctcctgcctcgcctggtccacacctgcmgtgtttgcttagctctgcagggtggggtcagcctacrtgagaaattcgaaaactcrmcaacatttcaaacatcagcagagacagaattcctgtgagacagcagctggcaggcacagagtagcagctgtccctttggtggggtgggggtcggtacatggtctccaagggtccgaggccyactgctcctgaccctatctgagaggtccctatcatttcctacccattttgctaacaaaagctgtctcagaagaagggggagggcagaaggcactgcccttgcctctgggcagcctcatcccagcccttggcactccagggtgccagtgaggtcccacctgtgcccccttaaggagaggctggtagatggctcatccccacggggagagtgagtcctggactctgtggccctgagcttgtcacttgctcaccccaatgaagcgctgcccaggggagattactgtctttggagtttggggcaggagggtgggtgaaatcactcagccagaggatggagaggctgctagtgagatacaggccccctcctcgagctttaggggtggaggaaggcaggagctcaaaggcatggggarctgagacattgagaaggagaggggagttccggagtctaggcccctccctctctcctggcctcctcctgggcccagtggagacaggagcctggagcctggtttgcgtcttctctcttctgtgggagtgagggaaggctttggtctctaggctgagccagtctcaggatcctgtgtccgttgtcccagctctgccctagcctgccatgagcgctgcaggaggccttctgcagrctggcgccctgcccctgggctcacctytcatgtgagagatggaggaggtgcagacctggccagtcactgcagtgtgcaggcggactgggaggccatcccagcacctgggatgtggacagcttcctggaagaagtcacagctgagtrtgtctttagaaaaaaagcaggagtcagctaggaargttaggtgatgggcttggggaggggagagagaagaggaggggtcggggccaatagagaagatgaaagcagaaggggcaaaagagaacayagcaccaaggacctccaagaaatgcactttggctraagtttgaggtgggagaggtcaggacttgggggscccgtgtggagggcagaattgcaggtgggtgtcctgctcgaactgatggggtgtggcccttgggggctgtgagttggggtggacttgatgagtcgtacattgaaggagacataggaataaaggacttctgggtttctggctcatgcagctggctggctctcattgcttttgagagaaatgtgagctggagagggattaggaagtaatcaattgtgacggctccagccgtggggtcggctctgtttagcgatggtggacttggactgtggtgctgggaaccccttccctrtaccttacagctgcagggccttgggcaactttctccatttctttktgcctccgtttcctcatctttaacrtggagaataatttttgctgtcctcagagttactgtgtggaataaatgtacatgtgaactgctcagaacagcacggggcagaagaagcgctctgtaagcttgagctcaggccgtggagctgggcagggtgtgaggtggaggccatctccaggaagctcagctgctgaaggcaggtccgagggcttgcaaacacccactttcaaggaatagtgggagggagatgagccgcagaatrgtggggagataggaggaaagccacgaggggaggcaggggccacaggccacgggccctggaacacagggaatgcagctgggatgtgggtgacgggtggctgctggcattggtatggaaggtgccagtgccttgtcagggyggagggcgactagagatcaaggtgaggggaaaaatagccacgagactaaaggaggcgttgaggattcgagagcctgaggtgggctggcctgggagccacgtctgcttggaccagctcctcctcttcctcccagggttgaggttgtacagagatttgtgacgcatcaacagctgtgaactgctgaccacatgtgccacatgacaccatgtgataggcgtgttattacctgggtacccgatgaactgttaggttttattgattgtcacacgtatcaggttcttcagagaaacaggaccggcaggaggtgggtgggtccagtctgcagggtgggctggcagctggagacgcggagagacagctgatgttccagtttgaaggccatagggcaggaagagttgttcatgtggacagagtcccaaggccatttgcsgagaaccccctcttacttgggggagggtcagccttttcattctgtttgggccctcagctgttggacaaggccygcccacaggaaggagagggatctactttcctgattaagatgctgatgccctcgcagaaacacccagaacaatttttttttttttttgagatggagccttgctctgtctcccaggatggagtgcagtggcgtaatcttggctcaccgcaacctccacctcctgggctcacgcgtttctcctacctcagccccctgagtagctgggattataggcgtgtgccagcacacccacctaatttttgtatttttagtagagacagggtttccccatgttggccaggctggtctcgaactcctgacttcaggtgatctgcctgcctcggcctcccagtgctgggattacaggcatgagccaccacgcctagcccagaacaatgtctgaccaagtatctgcgctccacgtagctcagtcaagttgacacataaaattaaccatcacaacacattcacttgtgttgcagtaaatctggaagcataaacatggggcgtgtygtcaggtgcacacctccagtggccacatcttcctgacctgacagagggaaagacacatctcctattgaaactgcactctggcaaggctccggcgtgctgctctgtggatgatgcacagggcctgggttccagagcacatgccagctgccctgcagtgactggcataaaggtcggatggggacaggagcacaagaacaagatggggtgagacagsaaagatagttggacgtctccatgaatatgttagcctaggatgtctctgaagctggttgatggtgacstttccttttagatttgaaattcaggcttcagtgacttcaggcccatattttatatgttatacattaacagaatgctactggaaggagagacccgagccaggggggtctgtgaagtgcatgcttagttagcgagtagctgaaaaacattaattaaaaaccaggatacctaactcattgcyggtggagtgagagtgtttaaaatctctaagactgagggaaaatagccgtggtaaaggggttcagcgggaccttacctggcaaccccatgtgctccctcgccctgtggacgtgatcctggctaaagggcagggctgtttgagtctcgcttactgattttagaaatacagcacttttcctcacyttttctcttagcataggacaattcgtgaattaaacttttcttaacctagtattttagcatcctrtttgcaacgtgtacattgtatgtacggtaggttcttattttttgtaacaatacaaaaattagctgaraaagtcattagattttctcagatacatgttctcacaactgatactggtgaggttctgkgtgtaaataagtttgtggaccaagaccttttcatacaatacstcatgtgattcctaaaacaacccaatgtgttagatayactgttattacagaagaggaaatgaaggccatgagaacccatatagaatttgaatttagagctgtctgattctggagtgtactttatccctctctactcccactgatgttatgaaactgctgaaaacaagaattacatcctggaagggaatttttcatacccatcttcatgaagagctacaggacaaggcttctgactttttttaggttagcttagtgtcattgtctgttggtgactgaaggaagctagctggcgcagcccccatgtgtgcaaggcccccgagtacacctgatagagccctatctggtgtatatgggtgcatgtcgctggcatcagcaccctgccggggtgagggtagttcctggagctactgggatgaaatgcagagctcccaacctggaggagtgcatggcccagtggaggagacagggcagtgaccaagtacagtggactgtgcagtagctgacccaggaagaggggcctcagccagggcagtgggcggacggccacacgggcgacctcctggagcagctgtgctggagtagatggaggctgagagcacagrcaggcagraggtggccagggatgtcattgcaggcacaagggatcgtgtccaaagacatggaggtacaggagggaggacactcgagggggcttgagcctggcatggggcatgctgccctggctgggtgtgaagggccttgcacacctgaygcaagacagcagcccgattgtgaggccaggtctagtggaagaggctggccacagggtcacctgccctgcyggtaggaggtacaggcatgttcgagccccatggccttccttatgacacactcacaaagaaagtcatcagagaaactgcaataataaatattaataaaagcagaaaacagttaatattttaaaagattatgaaggctaggtgtagtggctcacgtcttaatcccagcactttgggaggccgaggcgggaggatcacttgaggccyggagtttgagaccagccttggcaatattgtgagacctcagctctacaaaataaaaataaaaatgatccgggtgtggtggtgcgtgcttgtagttrcagctactggggaggctgaggcgggaggattgcttgagttcaggaggtcaagactacagtgagccaagattgcgctactgcactccatctggggcaacagagagagaccctgtctcaagagaaaaataacaacagagcataacacaacacagcatyctgcctctgaatccactcttcccactctgtaacscatgactcggccctgttttcctggcggacacacccagattgcagcattctccaagctgccccaagggcccccagcacccgcctcctccacacacacagctgtgtatgttttgaatgtggaaaactgagtgtataaataccagtgagcttmgataaggtgacacaaaaggacatattacaaaatcttctagcatttagttaactgtgagctcagtgtgcagcagccaaggactctttaygcattcactcagcaggtgttcctggagacccccatgaggcagcccccatgcagggtgcaccatggcctgttggaggtggacagagacagagagggtagggttccttacccaggctggttgagcagacacatggagtgataagtgctgtgggtgccagttggtggcttgtgtaagtgctgtagtcacagttgggtgagtgcccctctgcccgcagaagctggaggctcctcatgtggaaggtgatgtttgaactgagtcatgaaggaggaggacagtgggctggctgaggcggttccatcaggagactccagggttaatgattccatgtgacagggccatggcattctcagagctcggaggggaggggaggggagctgagaaaggggtcgggaaaggcccgcagctgctgagtggatggtttgtttggtttcttcacagaggccagtaagaggagcaggggaagtctagttagtaagaggtatggggtggggtggtctgctccacaaagtcatccagggatccagctttgtcctccctcattgctccgaggtgtttcttcctgcatgggcagcaccacacctacttygtagcctgtggtgrgggggaatgggacacgaggaagtgcaaggcagtatccttttgaggatgtgactcggaagttgcaggtcttgctttcagtcccatcctctggggcagaacttggtgctgaggccacrcgtatccgcgtggtgtgcagattgcaaggcagctctgtgcttgctccaacttggaggttctgttcctaaaaggaagaaggggagactggacgtttggggtcaaatggtctctgctacaagggcaaatctggaagctattttatgctcccttcaggggttttgactttatccacatagtgacagggcgccaccaagtgctctgctggggagacgcatggtcaccgtgaccatgttttaggaagtgcgtctggctgtgcckggagagtgggtctgagtgcaggaagcagatctggtctagctccaggaggtgggacttgtggatggaagcactggatcttttcaacagggcaaccagaaaaacagccagacagaaggacctgggtggtcagcactcacacagacactagtgttcccgtttggaaaaatgttacagtctattcaagcagcccaatgtgtgttttattcattctttcaaagaactctgtgtacctgctgtatgtgtatctgctgaatgccagggagcattcctgatgctaggggtacagaagggaagcagaaagagctctgccctcagaagcctctgcctaggagagacaaacagtcaacaacaaaacagacaggaaggacgaagggaagtagaaagagctctgccctctgagctcctgcctgggagagacagtcaaaaacaaaaccgacaggaaggatggtttcagatgggatatggtaagttgtagaaggatcagaaaacaggaagtccttgggggcagaaacagatttggttaggatcagtgagaaaaccccagagcacagcaggagagcaacttggggctgacctgtcggaggtgagctgtgaagggctcgccctgggatttgggatttggagtttcccaagggccctggggtttgggatgtgttctgtgagcagcgggaagccrttggatcattttctgcagtacagtgatgtgatgtaattggtgtctgaaaattccccatccagctgctgcgtagaggctgcaagtgtggacgagtggaataccagccacccttgcaggtagctttatggctgctccccatgtggggatgccacaagcatgaagtaaagccactgtcttctcagatggtggtcctgggttcagaacccaccaccacctgcccaccccgcccgctgaggtggaacatcctggtctcctagtggctctcttcacgtgggagtttgagactctgctctagctccatgctactgaagtgagcacccctgcatcagggtcaccatagagcttaccagaaatgcagctctcagaccccagtcagacctgtgcagcacagtctgcccttccttgatgatcccagaggctctgctgccatatcctctctggggctgtgtcccctggttaggctgcctttctcaccccagctctatgcacacactccccacaaccccacaccacaccaacacacacacacacccagaaatccatacacacccagagatacacacagagacacacataccctgcatcttcccacaccacaccgatacacacacacccagagatagacatacagacacaccctgcatcctctcacaccacagcaacacacacacacacacagagatacacacagagacacacaccctgactccccccataccacatgaacacacacttacaggtacacaacagagacacacacacatcaggaatcaccgtggccatacatgagacaagctttgtgccgaaggcctgtctggccagctcagggttgagggtcctggaccatgggcagatgctacgggagccacatgtgaggagtgtgagattcacagacaaggcctgtggagcttgatttgttgagagtcctgtgtgcaaattggtgatttgagaaaattgacctggtggcaatgagcaggaactaggaaaccctggccagaggcagggcctgggcrgtgggagctggaggctgtcataggaatatgaagtcctggagttatggctacccagtggacatggctatgtggacgctgtatgctttttttggtatgacctatcacattctgaattttctataacatatatctgttttttttgcaaccaagattaaaacaaaaactgccttggctcagtacagcgtgggccagctctgggatgtaggcagtgagaagagcaggcagccccgtatggggaggagcacatgggaggctgagtttcgggggctcctgcctgttctgtagaattccccgtgtgcttcttctggcagcacagggcctggcatgagcgggtccttggtgtgtgcttatcagaagacgtgatggatgtcacgtccgggcacctggccaattgatggtccttttgagagaaatacaggattctgggatgtagctagtttaggaagaaggctctgagttcgtttttaggtgccctgactttgtcatcatgatgagggagacaccaagttgttaagacagacagaaatgggcaagagctgggcgcggtggcttaygcctgttatcccagcacttttggaggcagcagtgggaggatcgcttgagcccaggagtttgagatctgcctggctagcatagcaagaccctgtctcttcaaaaaataaaaaatgagctgggtgcagtaccatgtgcctgtagtcctagctattggggaggctgaggtgggaggatcacttgagccctggggttagaggttactgtgagctgtgattgtgacaccacacttcggcctgggtgacagagagacccagtctgtaaaacaaaacaaagcaaaacaaaacaaaacaaaaaggagaagaaaggcctgggctggaccagaactggtccctctggagttgtccagggactgattagccactctttatcccttcctgtttgggttttcctggggttcttgggaccatcccagtccttgctcctatgtatagctgtgatgggtttagaccagtgtgttggcagcttgcacagctgcggagcctgtgtcggagctcagccctgtggatccttgcatgaactctgagacagctgatgctgctccagcccagagcgcagtgagagctggccatggttcctgaaacacagtttagctctcccgggtttctcagtgggaacatttacaatcagattcgagggcatatcccatttcatgggataaagtgaattagggaaaataagcttttactttacactgaaatctcctaaatttgaattcatgggattatacagggcacaggtgtgtaacatgatcttgttttgggccgttcttacagaggaagtttcatgctcttttcaaaacccctgtgtttttcttttactcgaagagaarttgtttcacaggtgcaacaaaataattttgaaataatttcaagtaatggagaaataatttttcttgtaaaagaataatggtggagtcattaaggctcactagaaacccagagagcctaggctgtgatattagctctgaggtcaatgatgcaagaagtcagtgacccacagagccacacctgctgcccccgccccccccccccccaatggcaggctgaatacagaggggactcgaaggagtggataattcctttgcctgggaggaggatgtttgcatgtttaacccaaatcccgtacttttatttcagatcatcagaaaagcccttactgaggaaaaacgtgtctcaacaaaaacatcagctgcagatcttgtgacagaaacagatcaccttgtggaagatttaattatttctgagttgcgagagaggtttccttcacacaggtaggtgtactcctctgggaaacacccccagtaaccctggccacactcatagagaatgcagggtctgccggggtcagggggctctgctgtttgttgatgtggccagacgtgaagccctaagccacgcagcctaacctgcgatttgtcagttacttagtaagcaaactcagccctgttttcattctttttactgtcatcttaacaaccatcacgtcaatgcatcctcttgtgaatattgaagcagctctttttacaacacatgctcaggaaaagctccttgcacccctgtactcaaccatttgttatttctggaaggacccactagaagtgtgacccaccctaagaagcctggagtggtgatgtcccctgktggcctatgcctgttcagctgcctgggcaactttcccaggaggatgggatgccaagtggcactggcagccgcgtggggcccccggcccaccactagtgcttagtgatgcacgccccctcgcccaggccagagggcgcagtgggaatggctgccacagccgggccccasagctgtccctgcaagaggcctgtatgagcacctcttaacctttttggggtcaccctttgagtatttgatgctagctattaatcttttgttcagaaaaattaaaatatttacacagcattttgcatagcattttaagggagccatgaaccccagattgagacatcttctttaactctggggggctctaaggcccctctctcacctctagagttctgcagtataaatgctgaagaccatgcaagggatcttttttcttcgttacatagaatcttttaaagatgttggattcttaaaactggaataccagttattggatttctggctgtagggtattataactgtcaggttccaggtttagatggacttaggtggcagaaatatagatggtactctccctcagtgtccattcagcacatggtaggcttaaaatacttttctttacatttatttttatatattttttaagagatagggtcttgctcagttgcccaggttggagtgcagtggcatgatcatagctcactgcagccttgaactcctgggttccagtgatmctcctgcttcagcctcctgagtagctgggattacaggagccactccacctggctcttttttttttttttttttttctgtgaatgattatataaatgaaagaacaagcgagtgttaaacacttaccttctttttttttcccgtcgtttccttctaacttgttaggttatctcaaggttaccagctctccctctgaatttctgtttgccagtcgctcatgtttgttttgttgacaacctttgagtttaagcttctctaacttcctatttccctactctgcttgaggtcaggatcccaagaattggttacagtagttatagggtgtaaagtgtttgtgattttttttttttttttttgagatggagtcttgctctggcgtccaggctggagtgcagtggcgtgatcttggctcactgcaagctccacctcccgggttcacgccattctcctgcctcagcctcctgagtagctgggactacaggtgcccgccaccacgcccagctaattttttgtatttttagtagagacggagtttcaccttgttagtcaggatggtctcgatctcctgacctcatgatccgcccgcctcggcctcccaaagtgctgggattacaggtgtgatccactacgcccggccccagtgtttgtgatttttaaaaagccttttaaaacctaattttagggtggctcacacctgtaatcccagcactttgggaggctgaggcgggcggatcacgagtgaggagttcaagaccagcctgaacaacatggtgaaacctcgtccctactaagaatgcaaacattagccgggtgtggtggcgtggkcctgtaattccagctactcgggaggctgaggcaggagaattgcttgaacctgggaggcggaggttgcagtgagccgaggtcacaccactgcactccagcctgtgtgacagagcaagactctgtctcgaaaaataaataaataaacctaattttaatmaaagggcaatagcaaaagaatttatcatatggattctttgagaggaagcatgctgcagtaacgagccggctgtttccaggtcctttattaaccatattggcctagaggtttctgcggtgatgatccgtgtggccgtggcatgggagggctggctcatctgygtggggtctggtaaaggcttggaggagatgcaggatcaggcacagtgaagttattggggctgtgatgtgtttcagtcaggtcacttggacaaactgcactctgagattgcacgcaacccactgttgggttaatgtgtgcagttggttccatttgtaaaaggtaaatttagatactcgctgttgtgtacacaaggtaaaagttaatgtattatggggtgagcacaggtacctccctccacccttgaggccttagggttgccagggaccgccagactccagagttccttkggaaaaccatgatgcagagcaggggattataggtagggtgagacaggcttacctgggagcgtgcccgggctgaacaccagcctccatctctgaaaaggccccctggtagggtcagacccacacacctgtccaggaatcagtgattgaaatctggggttcccaagctctagcccacaagtcagtggactgtggctgcaccacggacagccccagtctgtgtgtcacccccatcttccctagctctgagggtgaatgtgtggacayggtgaaagcagctgttctcttctctgctcagtgtgcctcaaaaattgacatcaaatgcagttgtttttcaacatatttatgtgaagtgagttttttttgccaatgactaagattaaaaagaaagtaaattttggggatttaattgtattttagatcatagaaaagttgataaatttgtgatgagagaaaattgtatacatattgtaaaataggacattgtgatttttttctgctttctaagtatttaaatatatcccttaaacaatatatttaatttgaagttgcctctcatcctcctttaggaaagacttttattctgagcttttctctttccttgattttagtctttcatgaaatgatattaaaaatagacttaataacatttttttaaaaacctgatacaggctccccagttttattattttatttcactcatccatgaaatccaaaggtttgctccttgacctggaagacaggtgtagactgaatcaaagaatgataaggtttaaacttccttctggtggggtgcagtggctcatgtctgtaatactagcacttcaggagsccaaggtcagaggattgcttgagcccaggagtttgagaccagcctgggcaacatggtgaatccccatctctacaaaaaaattaaaaaatcagctgggcatgctggtgcacgcttatgctcccagctacttggaaggctgaggtgagaggctckcttgagtcctggaggtcgagttgtgatgctgccactgcagtctagcctgggtgacagagcaagaccttgtctcaaaaaaaaaaaaaaaaaaatgtagattaaaaggaacccttgcagactgttggtgagaatgtaaattgatgcagccgctatgaaaaaccccactgcactgcagcctgggcaacagagtgagaccctgcctcaaaacaaaaaaataaataggctgggcgcggtggtttacacctgtaatccctgcactttgggaggccgaggcgggtggatcacctgaggtcaggagttcgagaccagcctggccaacatggtgaaacccccatctctactaaaaatacaaaaaattagctgggcatggtagtgcgtgcctgtaatcccagctactcaggaggctgaggcaggagaatcgcttgaacctgggaggtggaggttacagtgagctgagatcacgccactgcactccagcctggggaacaagagcaaaactctgtctcaaaaaataaaaaataaataaataaaattgcttctgtcactggccctagcagctttggcaaatctcaccacttagggcctcgaactcctcacctgtgaatgagggacctgaccatggtcatccctgaagtcccagcatttaactcgtaacatgacaaaaagcaaaccagggctgggcacagaggctcacacctgtaatcccagcactttcagaggccgaggtgggtggatagcttgagatcaggagttcgagaccagcttggccaatatgatgaaaccccgtctctactaaaaataggaaaacaaattagctgggccatggtggcgcatgcctgtagtcccagctacttggaaggttgagacaggagaatcgcttgaacctgggaagtggaggttgcagtgagctgagattgcaccattgcactccagcctgggcatctcagtgagactccatcttaaaaaaaaaaaaaaraaaaggaaaaaaaaaaaaaaggcagcatggtaaggccgggtttttatagattgggtctttggagtgtgctgttggccttggccacatagctgtcycctgccatgccctggctttgtggggcgcctaaacctgttttcagatgatgattttgagtgagatacaagtgtagctacttggaaaagattcagtagcatyccygagctatagtgatagaaaccccgtccttgtcccttctgtggagcagcctgttggagcttctctgggttggcctaggcccagagatgaggycagcagctcaagggtctagtgtttttagctgtcttcccagccctgctccagagcccccatgtaacctgctgccctgcagtgcccagcacagakcagtgtctgttgaatgcgtgagtcaagcaaaacatcaaacagaatccttgacatgggaaaaacatgctcccagccaccaccagctgaacattgacatccagctgctttcccactgggcagtggcttgtgaagatggggacagagtatcataaatcatctcctttgtggacagcagggatgatcctgaccttcttgtcacagactaaacagactaagtagccagaagaaaaaaaaagaaagaaagaaaaaaggggcttaaaggcactyagctgtcaaaattataaggagggtttgttaaaactattttttaaaaaagaaaagtggttaagttatgcagtaggatataatattctataataacttattaccaaacttttagccttaatccagttgctattttcctcttgtctattggatagacgtatggaatgttctttttttccctaaatttagtcatgtgcattttttttcctatttatattgtgggttttttttttttttgagatggagtcttgctctgtagcccagactggagtgcagtggtgcaatctctgctcactgcaacctccgcctcccgggttcaagcgattctcctgccttccaagtatctgggattacaggcatgcaccactatgtctgggtaattttcrtatttttagtagagacggggtttcaccatgttggccagtctggtcttgaactcctgacctcaagtgatccacccacctcagcctcccaaagtgctgggattacaggcgtgagccaccgtgccctgcctatattgtggattctatgtagatgttccagtggcttttaggaaggtctttatgatttcacacatctgtctacagtcatgtctgcagagcagactctccccactccctctgcagacagctgtaaaacattgtctttcatctcacaggtattagcttcctacatgagtaaaatcaggtttaagtgaataaaaattgtgcatctcttcccatgtaccagggaagtatttttggtgcctccaaagaccgagcacggttcacgcctctgctggccttcacaccgctgcagccacacagtgcagaagcctgctccctgctgcccacaagcatgaggcaggtgggaagggggatgctcgtgccaccttgtaggcgggcaggcagtctcatgggcagaggtgtacacaaggtgggtgatgaggaagacagctctagggtatgaatgatcagctgctgaaaaacatccagtgctcagtgtgggtacttagagttattctcataaaaaatgtgaggcagagttagtcaggtgtggtgatgcatgcctgtggtcccagctactcaggaggctgaggcaggaggattgcttgagcccagtggtttgtggcttcagtgagccatgatygtgccactgcactccagcctggctgacaaagcgagaccatgtctccaagaaaaaaaaaaaaaatttctaaaagtacttgctgggttacactaaatgaaacctaaaaaacaaatagataaataataaaggttacacacagcagaagctttgttaacaaattaacttatattaatagttgctgctgggaaaacaagctgcttggtgacttccctaaagggtgtcccacgcatctggcgaatgaacagacagagctcctsctcccgagtgtcctgggaggcacgtgggcatgccgcgtgggtggtctgggtgctgcagcgtgagttgtcctgggtgtggagtgtcagtgcctgcagacccacactgcctcctccttcagggctcactggcagttttctttccaccgcttcagtttcctacttgaagtcaggtttaaaaaggagaagaattgcacattcctcctcagtttcttagaaacttacctttgtgcctgagtcrtttctagtccctctggacctgagtcatatctgttcgctgctttgtcaaccttgtgcccagtttaagctttcgtagttgctccttgtatgtgtgttttcaggrtgkggagcgttttctttaaaaacgtcattgcaagccattacagaagaggaaagtcacatagctacagaagacatggaaaaacagatttagtgcctgaagtttctaggaaaactggcagtgctgacagcacttatgrtcaygccctaagtggaatcatcacctgtgtgtctcctgcaggctgctgttgtcaggaggcagcctctccaccccctgcccyggctgccattgtggcttctacccaccatttttcctcctagatctgtttggggagcaccagttcckgagcaggggctctggctggtgggcctgtgcatcacctgacctagaagcatgtggacaactgagagtggagaggcagttcctgcaaggagcaaggygtgcagtgtagatgaagaaccagaagcctgggttcactgcatctcatctgccttgcctggctaggctgaaagctccaggggcagactgagcctgcccaggctctccaggaacagctgatgattccttgggtgtcttgcttagtgctcctggcttgacttgacctggtcttcttggctcagaagcccctgcttattcgtgggtttctccagggggccggggaggaggtcgcacagcctgagatgatgtatgcrtgcacttgtcgtatcccagggttgtatttctagataatttatcagcaaaatggaggggctggatgactctgcatcccaggcatgaacttcataacccagcagtggaaggatggtcccagagtggatggggaccagggtggttacagtgtgtatggcagctcccgtgcatagaaaagtgacatcgggccaggcgtggtggctcacgcctgcaatcccagcactttgggagcctgaggtgggcgtatcacgagatcaggagttcaagaccagcccggccagcatggtgaaaccccatctctactaaagataaaaaaaattagccaggcgtgtggcgcacgcctgtaatcccagctactcatgaggctgaggcaggagaatygcttgaaccygggaggcagaggttgcagtgagctgagatcgcgccattgcactccagcctgggcgacagggcgagactctgtctccaaaaaaaagtgacatcgaataccatgagatgcctgctgttgcctctcagcatctcggtgggaggacagcactgccagcrgctctgtctgttgctgcaggggtggcccacatctgctgtgtccacagtggtagcckctcacscacgtgactgccaagcacttgaaaggtggctcatgagactgaagaactgaagtctttatttaattcaaatgtaagcagccatatgcggtgactggctactgtaaggcgctgagcggtcacagaggttttcatttcagtctttccattcacactcaagtctccagccttatccaaaagttcattgatgccaaatcttagaccacatggttcgtgcggggaaagtggcttccaggaggctgatgaccacagtggataatacaccaaacaccagaacatgggacgcttctttctttctttccttcttttctttcttttcktttctttctttctttctctttctttctttctttttctttcttctttctttctttctttctttctttctttctttctttctttctttcctttctttcctttctttcctttcttccctccttcccttctttatttctctctctctccttccttccttcccttccttctttcttttctttttcttttctttcttttcttttttttgagatggaatctcactcttgtcaccccggctggagtgcaatggcatgatctcggctcactgcatccctcccgtcctgggttcaagcgattctcctgcctcagactcccaagcagctgggattataggcgtgcgccaccacccccagctaatttttgtatttttatttctttttctttttttttctttttgagatggagtctcactctcccaggctggagtgcagcggtgtgatctcagctcactgcaacgttaggatcactgcaacctccggctcactgcaacctccacctcctgggttcaagcaattctcctctctcagtctctcaagtagctgggagtacaggcgcccaccaccacgcccagctaatttttgtatttttagtagagacagggtttcaccatgctggccaggctgatctcgaactcctgacctcaggtgatctgcccgccttggcctcccacagtgctgggattacaggcgtgagccaccgcgccttgcttgtttttcacttattttctttttcttactctctgcaggtctcctttttctctagtacacatgtgaacccggcacaggaactggatagaaaacctctcggcaaggccacatagtcatgcacagaacagatgtttgcttagcgcctgcccaaggcctcacccttagtgaacttgggacagtccaagagtgtcaaaagcactgccctgaatgctttagatctagtcttttctttgatcctgagaatgcctttggaaggtgtaaacagcggccagctccacagggaccagcctgcagaaggtgggctgcgaatacacctgaccacagcatcttccctgtgtgtgtgggcctgcgtgtgggtggggtgcaggaggaagggtgacagtgcatggggcgagagtgctttcccttgtttttggcctgagcagggggtgctgggagttgccattcgtggaggtagaggcaagtagagaaaaccaggagttcccttctgtgcaggtgaatcttgagagaacattgtctcggtcaggttcctagcaggacagacgcacactcargtgaggattgtagggggccttgtttgcagagggactcattacaaaggaggggccagcccagggcctgctgcagagtgcaggagcaggccgcccatgtccctctagcaggaatgtgtcaagcaggccacatggaggagtggagcctgcacagggcacatggggcagggagcgtcccagcctctctccttcctgcagccccacccttgcttgctcccagagggaagctggatttgtgactggccaatgtagcaagaccccacctctacaaaaataaaaatactagctgaatgtggtggtatgcatctgtagtcccagctacttgggagaacaaagcaggaggattgcttggatccaggagtttgaggctgcatgagctatgatgataccactgcactccagctgggcaacagatcaagaccctatctcttaaaaaacaacaacaaaaaaaccagggaagtcagataccagggcaggaagggcacctttgggaaatgaaccagctgcgggggggctctgtttgtcacctgtgtctgcagttcaggtgagccaggctgggtacagacgtgggagatctcagctgcaagtgacatttaacccctcggtgcccaggtatcagcattgactgggagaatcaaagtcagagtcctgggccaccttgcttggtcatatctcatcagcctcctcccctacagactgaagttaaaatcgagtttagttttgcttcagaagatctgttttccagtgttcttcacgcttgcatttctctgcctggcctgctggaattccctggtgctctttctgaacgctggcactgaggtgtcactctgttttctaaatcctgctgagtaggtccgctggcaggcaggtcaaaaagcacatggttgtttaaagactctgcctctgtttgacccagagaaaccatgatgacatctgtttgctgtgccacctttttctttaatgggactggaagcaatttcaggcacgttattctgtgtccttggtgcattttctcaggctgggttcttccnctgcaggttcattgcagaagaggccgcrgcttctgggrccaagtgtgtgctcacccacagcccgacgtggatcatcgaccccatcgacggcacctgcaattttgtgcacaggtgagctgagcagggatcgcctccattgcagggcttaacatgtcctcttctgtgaggttttgtcttttcaaaagcagcattttttaaggcaggaatatataaacaaacctatartacactcatagtctcatcagaaagatgatcagatcttgatatttttaaaataaggttttccgtttgtgagaggctcttggagtatgttaggaaatctgcacttgtttaaaaaccagtttgttatgttaaaaatgttgggttgcatttaacaaggaccccttgaaggagtctgactcccctcacaccccacccccactggagaaaaaggtgaggttgggatacaaagcctgtgctgccccacagtggcccggagcccaaggtgtagagagtggcctgtgacaggtgagacttgagagccagcttcctgtatgagagcaaaccttgtggttacaaaaagcaggaggtttggggaggtcagaagggcccgtgtggggaggtgaagggaatggagcttcggggatggtgaagtgacaggatgcaaaggtgacagggacacgaccacaggtgttctctggcagtggcaggtgatggtgctgcgctgcctgtctacacgcacaggtggctgggggcctggggcacagagcatgatgtggcttaaacggagcrtggttctccagctctggagaaccctggagagattcccattccatgggcgggtggcttgcagctcctgcgctcacagtgcacgccagcacactaggctgcacgcgctaagcaggaagggtgagcagagcccgggtgtgggctcctttatgatctgcctctgatggcatgtttatatgtaaaacrtgaagttattccatgctaagcacagcctttttctaggtgagttgcctcgagaattcagttgtgcctacataaggtgaccctttcgaggcagtggagtcgtgccatctggtgccagcaaatgtgtcaccaatctctcctctcatttcaactaaagcatgatccttcccagggctctcctccccagagtatgtcactgagtggagcctcattacttctgcctgctcgtggttccagggtgctcataatggtgacatggcaggtgaagccccgtcacatggtgaaggccacacgtccattcgagggtcttcagtggctccagagacatagtttccagtgctttcctgtctgcacccctggggggatcctggtactgggraggtgactgggaaaagagcagcaatttcagaacagtctccagagctgatcctgacagttcctgaaccccacgctatagctgtggtgattgttgtggtctgaagacatccgaaagccaccagcatctgccactcagatggcgcctgttcacccctgtgcccaycagtgctgggccacagcagtgggagaaagctctcctgggcactggaacaagcgtgaggcctggcacatggtgcatttgctctggaagccagcggctcatcccaaggtcccacacaccctggcagtcagagttgcatttgtgtacaattggttttgcatttttcctgtcagtttgcagtacccagcctttcctgcctgtttttaagctccagtgatctccctataaaggaaggattattttgaagatattgagcggcaatagcagaatcacaaaactgcaggcaaactgatcatgaaaactgtctgcagccgtggctgtccctgcagctggctactgggcactcaggcagggatgctagcagtgccacagggtgagctgtggctcagaactggcccccatggggaggctgtggtgccttctgggaccacctgcctggcgccccacctgggactgggtctggcctttggggagggctctgctgtccctttaggtctggagaaccagaaaacagatgattgagatccttcctaattgggcttcagagggttgttgagttacatcagtcttatgtgactttcacagtgctgttttctttcaaggttaactgtcttacgacatggtcagtttattctgtttgtcttggaagcagttagtgaaactgtgggaagtagtttttaaacaaccaacccacccagagtgtaggaaggtccttctgagcctgcggggagccgcacagcacacaggctcccgagagctgccgctcttgttccagagagtaaacctttctattttcctttgcagattcccgactgtggcggttagcattggatttgctgttcgacaagaggtgcgggtgtggcccaggtccccagggcccctccctgggctccctctggccatccttcctttctggcttcagcctctgtgcgcctggtttgctgtttgccctgtgccttaatcatgactggcaaatccaagcctgtgggtttcaaatccgagaaaataaacaagtccagactggctttggggtgtgcggggtggggctccgtggctggcccttgtcccccgtggagggctggcctcrtgtcamccgtggtctatttgtgacactgctgtggaagcggaagtcttaagtgaacggtccaagtgcatctccagctgacccctagagcgtgtgatctcacaaactaaaaggagcacttagttttggagagcatcctcaatcccaatattctaataattctttcttatcttcctctggttattagcatgagaacatagctctttcatggttcccatagaccttctgaactacacagtgttgtgcgacctgcatggaaggcgtggggctgaggtttaaagcttattaartaattcaagcagcagcactgagaagagccttaatttctttctaattgaaacagttttatttaaatagggccgagggctgcatgtttctcaaaagcagccctgcttcagagcagcatttgtgcagcttcaccttagtctcagcacagactccctggcaggggagctgagagaagtacttaagttgaagtatttaaagttaagtactaaagtatctcaaagtacttaagctgaagataagtaagaattgtaatactgtaatttgtctaaggatgcaatgattgacktctttctctgttaaataatattgtggtgcccagagtgggtgggaggctgagcagtacttcaggggttgattgatgttctgtgactgtgtgaaggggctgctggaacagctggctaggtccttggcccttctgtgggttggctagggtctgtcctatgttmctacactgaatacgggagctcctggcttttcgtggtgggctcctccccatgggagtgggggacattcctctgcactctgggagctcttcacaggcctcaggaaccagccgaattctaggactgacctggtcatgaggattcctttaaagccagggtaccggaaggggaaggatgatgaaatgctgccagacacctgcaggcyctgaaaaagcgttgactgaatgacgcctccaaccgccagaaataaaccctttctctgtagcttggggtgtccactctagggtgtttgtgctcaccccagggccagccaaggctttcctaaggcatttggccagggtgtttttttaattttccagagaggtgaacacttggctaacttgctaagcaagcatgctggcccttgttaaccctgagtggtgaaaagtcggtagaggaaagatcacagaggcacgcggccgtgggctgccgtccttttccacgctgacctcttccttttgctgcttcatcctgggaggctgtggtctgatgctttgttccctgatgtggggcagtcgggccactgttcagcgcactgcctgctcacggatcagtccccagtctgcggcggtgcctcttcctcgctggggctgtccttgggcttctgagattccgctggctttacagatgcattctccattcttcacacatcagcaattttgaggatttcttgtggggtttggttagagtcacaagtaacattctttttttcagcaacaaaaggggcctttctaaaaaattaagctttttcaataacttctggttactaatacttgattatgatgttaatttttaaagttttgtttgtctgaatatattttaaaattgtacttatttagcaaaagcaagcttgcttttatgtccaggtctcattttaaatgcaggcactgctttttctcagttccttttggaaaggtaatttctgtcacagtgtaatgtgttatcctaacgcctagcgcagccttcatctttgaataacaatgttttttcccacatcaaacragtgaaccatctttgttttctgtcctgcctctgccgcccacagcttgaattcggagtgatttaccactgcacagaggagcggctgtacacgggccggcggggtcrgggcgccttctgcaatggccagcggctccgggtctccggggagacaggtgggcttcacaacgctcgtctcagtttacttctgaaanaaaagtgtgaaaggagaatgccaaagccaccatgatgtgggacggtggtggaggtcccttgctgatggtgtcatctctttttagggacatcgtgtccctgatgaactggaaatggagccagttctgtatgttagtgtttttgttcacgtggccaggagctttaaataacctcattctgctttgygctcacatccctcatctttcaggctraaagtactccagtcgcagtcacgatttggttgtagtgggattgggtgagcagcccgaggccaggtgcttgttcccctcagagcacccggcacacctcggtggtcccgattttgcccaggcactgctgcccaggtgcagtctgtggcccctgagtgtgcacaacagtaactggcttcagcttctgtgagaagagccatcctggggaatgagtcatgtgaagaggcaccttagcccctctgcagttatggcctgccgtgatttccttagcccagaatctcagggtcatccagtggctctgagagaggggttcccattccctgcatactgcctggaaccgcctgtcctgaatgggccagtttaggttttcactgattcttttcggcctttctcccacatggatgaatctggtgatattttaactgcattgtgagacaggtactgtagggaacagaagaatgccagacaaatgagagaagcctcagactagcagcagctgcatgggagattttacaagctccataatacctgcatgtctgggtttgaaaaggcggaagtgcactgctgcttgtttctgccttgtgtgtctctggcgtggacatcatgcagggccccccatctcattccctgccagttacactctttcttctgctctcccatcagcctccctgccgcctcccctcttgacccacttccagcctctcttaaaaattcctttcctggcaacctttcttcattgtctctatttattcctacttctttcctccctggctgatgcctgtgtgcccagatggccttcgaggcagygagaggagctatggccatggcccatctctgctgctgtgagcccgtgcggccaggaaagtggcgggccaggatggatgaggtgtcaggagagggcccgccactgtgtgagggacacgaagggcaagattgtgcaaaggagaggaggtggctgcaggagagcccagagcaggggaagggagaagtcatgggggcctctgaggggcaaccagcagttggactcaccagttagagcttctgatcccagagaggccttggaatggcctctggccctgcctcaccttccctctccagaagtgttttgtttggcagtgaaaaaagtagctttaattacagctgtgcgtgccaggaggtgcccactccagcctcattgtgtaactggtggtgaggaagcatgctactaagcatgctcgggtgaactttgctctatatttcactggattataacactgaactctattaacatgctcttggcatcctggctgcccgcccrtgtagctcagtcaggctgcaactctgcgtcctcccagcctgcaggctgctagctcaagcaccaactccactagggcaagggctttgtccagggcccctttatgtggcccccagtaggcctggtaatttcgtagaatgaaggaaacatgaagtgctcatgttctgaaactcatttgtgactttagaaaaattctgatggataaaatgcatagcagatagctgctgctagtctgaggcttctctcatttgtctggtattcttctgttccctacagtrcctgtctcacaatgctataaaatatcaccaaattcctccatatgggagaaaggccaaaaagaatcagtgaaaacctaaactggcccattcaggacaggcggttccacgtgttttctaccatggttgttttctttcctatgggtagatggacttcaggaggtgacagtgcatgctcttcagcagcacggtctcttggcaccatgcagacccaatttcagatcctgattctgccgcttttttttttttttttctgagatggagtcttgctctgtcacccaggctggagtgcagtggcacaatcttggctcactgcaacctccacctcctgggttcaagtgattcttctgcctcccaagcagctgggattacaggtgcgcaccaccacacctgactaattttgtatttttagtagagacggggtttcaccatgttggccaggctggtctcaaactcctgacctcaagtgatccacccgcctcggcctcccagagtgttgggcttacaggtgtgagccaccacacctggcygattctgccactttctaaggtgactagaactcgagcaagttccttaacctctctgaatctcagtcctcatattgaaaacggggatgctgatgataataaaaataaccgagaggattaaataagttacgcatataaagcacccagcatagtgcctggggcacagtatcctaaaatgagaaccattatcaaagaagaaacttgaatctttgcacaaaaccaatcaagtcatgccccgttgttaaaattaggacttgtttctggaggacacagtsattaaaacaagcaccactaatctctctctctttctccctctctctttctgcttcccttggcttcccctttcttatttctattatgccttgctggaatatcttcaactcacaagttaaaaaacagcactggatagaggtaaaggattagaagaaggcaagaattttattagctgcttcttcaaattctaccatgcaaatttcagacatacacaaagtacacagaaaaagcaaaatgatgccccatgacccctcacatggcagcacgcctgcttcrtgtgtgtccaccagctcccgccacccccagctgcctggagccaatcccaggcatcaggtcacttcctagtcagtacttcrgcgtgtctccaaaaacagactgctctcttacaaatacaatcacatcatcaatatcactctctacccaaaatgcatccctaaaatcagcaaataatcccatcagtgttcaaatttccaattgtctcgtttttatggaaagtggcctcctaaggtcatagtctgcgttctggggggacttcctgttcctgggtcagtctttgttgccttttcactggactgtgctaggaagtacgtattttttatttgttttgttttgttttttgaaacaggatctcactctgtcacccaggctggagtgcggtggtgcagtcttggctcactgcagcctccacatcctaggttcaagcaattctcctgcctcatcctcctgagtagctgggactacaggcatgcgccaccacatctggctaatttttttgtattttttagtagagacggggtttcaccrtgttggccaggctggtctcaaactgctgacctcaagtgagccttttgcctcggcctccgaaagtgctggggttacagttgtgagccactgcacctgaccatatttttaaaatatagagtcgataatgagttatactgggtttttttttttctgtttttttttttctgagatggagtttcactcttgttgcccaggctggagtgcartggggcgatctcggctcactgcaacctccgcctccctggttcaagtgattttcctcctaagcctcccaagtagctgggattacaggcgcatgccaccatgcccagctaatttttgtatttttagtggagacagggttttgtcatgttggccaggctggtcttgaactcctgacctcaggtgatccacccgcccgggcctcccaaagtattgggattacaggcatgagccaccacacccggcctcaaccccatctcttaaaaaaataaaaagataacctttgctctcagtaacagttgacaagcttgttctatgggtcatgtcctctctctgtcacctgtccacctctggatggttgtgctgcatcctcattgggatagcacccagccactgtgtgccacgctctcacctcaaagccatcattcagtcatggttccacaggtgggtacagatttaacgccaccactgtcctgtgtgctgatgcttctccagtcattctggttgtgtgaagtacattctctagtatagcatttttaaagctttttgatcttaggacaaacccattcatactcctaaaaaaattactgaaggcctttaaaacatttattaattcattttaagattaaaaattcattacattttaacgtgaataatatatttttatgggaamtaatcatattttccaaaataagaaagctttagtgaggagagtgggatagttttacattttttccaaatttctttatgtctggcttaatgtaagacaactagattctcatatctgcttctgcattcaatctgttataataagttgttttggtgtcttttattattattattattttttagagacagtcttgttctgttgaccacactggagtgcaatggtgtgatcgtagctcaatgcagccccaactccagggcccgaatgatcctcccacctcagcctcccaagtagctaggactacaggtgctcaccaccatgcccggataatttaaaaaatatttttgtagagacagggtctcgataggtttcccaggctggtctcgaattcctggcctcaagccatcctcccacctcagcgtctcaaagtgctggaattacaggtgtgagccaccaacccagcctgtttttgatgtcttaaaaaatgtctaacctcacatagatacgtagtttaaaaaaggagaagtgttttaaatctcttttcagataactgagggcatttttgtttgatatcaaaccaaaactcaaaaagtagcaattttttttgtttttgagatggagtctcactctgttgcccaggctggggtgcaatggtgtgatcctggctcactgcaacccctgcctcccaggttccagtgattctcccacctcagcttccggagtagctggaattataggcacgcaccccatgtccggctaatttttttttttttttttttgtatttttagtagagatcaggtttcaccgtgttggccaggctggtctcaaactcctgacctgaagtgatccacccacctcagcctcccaaagttctgtawttacaggtgtgagccaccgcgcctggccaagtagagatttcttaaaggttagttgcagtgtgaaatctagtggatttgttggtactcagttacattgaaatccattgggctatcttgtactttgaatggatcttttgttcattgttgattttataacatcatgtattggtcgtttgggaaatggtttcactgagattttcagcgcttctaagtgctgatgtagtttttaataaaatactaaaaatgtcatattaatatcaccactcctcaggagagctcttgaagtgttggaaagttgtcaggcttacagtgttagatacgatttttcaaaaaaataaaaaaawatatatatttttgagacagtcttgctctgttgcccagtccggagtgtagtggcacaatctcggtttactgcaaactccaccttccaggtttaagcaattctcctgcctcagtctccygagtagctaggattacaggcatgcaccaccatgcccagctagtttttgtacttttagtaaagacaggatttcaccatgttggccaggcttgtctcaaactcctgacctcaggtgatccacacgcttcggcctcaagtgctgggattacaggtatgagccaccacactcggcctttatttattgattgattgattgattgattgattgattgaaatggagtttcgctcttgttgcccaggctggagtgcagtggtgagatttcagctcactgcaacctccacctcctgggtttaagtgattctcctgcttcagcctcccaagtagctggaattacaggcatgcaccaccatgtctggctaatttggtatttttagtagagatggtgtttctctatgttggtcaggctggtctcgaactcccgatctcaggtgatctgcccgcctcggcctcccaaagtgctgggattataggcatgagccactgtgactggcctctttttttaaattgtagaagagttttcttgaattacagtttttaatattttttttatttcccaattgtgttgctttgttttttgtcttctgggacttgaatgtatgttgggctttcactatcatttcctcttgtactctttttatcttttccaccaattatcttatttaaaaaagtttcctctttttcaccctcaatttcctgcaaagcataatctcttgtgtttattcattatgttccttttagtttgtcttcttttctgaaatatttcctttatgtaatttttcctaagttctgtgacctgtgatttggattatgctcttttttcctgatattctttattactcctattttgtggttagatttcttttttttggcaaaattcttttattggcatatacatgttactctgctcctcactctttttttcttaggataattgtgtgtgggattcaaccatagttctttttggttacctactgttacttgacattggattcctgggctttgggggcttggagggcgggggtgggggctccagacagcatttgtagtttcatggttctagagctccctcttcattgtttttgtgaagtattaaaatattggccttgttaggcgaggcacgatggctcacacctgtaatcccagcactttgggaggctgaggcaggaggttcacttgagagcagaagtttgagaccagcctgggccacatagcaagaccccaatctgtacaaaaaatttaaaaattagctgggtgtggtggtgcatgcctgtagttccagctactcagagggctgacatgggagttcaaggtaacagaagttcaaggtaacagaagctatgattgcaccactgcactctagcctgggaaacagagcaagaccctgtctcagaaaaaacctccaaaacaacacactgatgaaagtgtagtcacagaagttatatatccaacaaaaccagcttgtgccacaggcatgttttataggctttaaagcacaactgcctcttactcygtgagtacrtatttcttttttctttttcttttttttgagactccgtcacccagcctggagtgcagtggctgatctcggctcacggcaccctctgctcctgggctcaagtgattctccaaagccagccttccgastagctggaactacaggcacacaccaccatgcctggctaacttttgtatgtttggtagagatggggcttcgccatgctgcccaggctggtcttgaagtcctgacctcaaagcgatcggcgcacctcagccttgcaaagtgctgggattacaggcatgaaccaccacgcccagctcatgagtacgtatttcagtgtactcaaatgacttctctcattatttgagttrtaaagtttcccctaagacagcatactcttagcattgctcaaccagagcaagggtttccaaactgtcggaagtcactggctattcattttcatcctaaaatctgtttattgaaagaataaacagagatgtcctatttcaaaatgtatgagatatttttattgtagtaaaatgtatgtaaatatgattttccattctaattactcttcagcataccattcaatgacattaattatagtcacaatgttgtacaatcatcagcactatataatctccaaaatgtttgttcctacaaataagaactccacctattaagcaagaactccctgttccctgcttcccatgaaatcacagaatatttgaaattaaaaagatatacattaggccgggcctggtggctcacgcctgtaatcctagcactttgggaggccgaggtgggtggatcagttgaggtcaggagttcgagatcagcctggccaacatggagaaaccccgtctctattaaaaatacaaaaaaaattagccgcatgcctgtaatcccagctattcgggaggctgaggcaggagaattgcttgaacctgggaggcagaggttgcagtgagccaannnnnnnnnnnnnnnnnnnnnnnnnnnnnnnnnnnnnnnnnnnnnnnnnnnnnnnnnnnnnnnnnnnnnnnnnnnnnnnnnnnnnnnnnnnnnnnnnnnnnnnnnnnnnnnnnnnnnnnnnnnnnnnnnnnnnnnnnnnnnnnnnnnnnnnnnnnnnnnnnnnnnnnnnnnnnnnnnnnnnnnnnnnnnnnnnnnnnnnnnnnnnnnnnnnnnnnnnnnnnnnnnnnnnnnnnnnnnnnnnnnnnnnnnnnnnnnnnnnttaggtggcaacattcagacctcctttatactctgttctttttttttttttgagacagccagtctcagttgcccaggctagagtgcagtggcacgatcttggctcactgcaacctctgcctcccaggttcaagcaattcttgtgctttagcctctccagtagctgggattacaaatgtgtgccaccacgcctgcctaatttttttttttttttttttttttttgtacttttagtagtgacagggtttccctgtgttggccaggctggtctcgaactcctggcctcaaatgatctacctgctttggcctcctaaagtgctgggattacaggcatgagccactgcacccagcctatactctgttcttgatttcatgtgggaaaacgtatgttggcaagaatgagaaggaattaattcagggtggccagaagaagaaggtgctggattcagagcaagcttttcacaaacaggaaaactatggaagaaacccctgccttcacacaatcaccagacaagcttgggtgtaagtctggccccaccatgtaatggctccatggcctgagcagctcatgtcgcttctccaagcttgggtttctcatctgttgcacggggcagtggcacgtaggctgggaagtgctcgcacaggcctgtcaggaagagtgaggacctggtcactgtcagcaagtgaaaaattgctgtttcttgcacacaaattaacttccctttgtgaaataccccagggcacttggttggaagatctctgtgcttcctacaccagccctggcatggggagtacctgcctgtctaggctggcactggcggactttcctccacccacccgccctgtgctcatctctgccctcaggtgtggggagactgggtgaggcctttaagagtaggtgcttatctcccaatggaaattgattgctcagcttcctagttcctggggagaaatcttcagtgtcttccttcatctcttcccagggtcattaacactggtgccagcaagtgccctgtgtgttaggatttcactgtcctgattttactgctcagagaaaatcactcttagagtgtacctccagggtgagcctgcctgttagggacttggaaatagtacaggatccctcatagcccagtagggttgagggggcgtatgtataattgattcagctttcccagagggcaatttggaaaattatatcaaaacctaaaatatgcacaccgtttgattcagaaatcccacttgtgttcatctatctcgaaaaaaatcagtatgactgtataaacctctatagaaaagatgtttatgaagcattgtttacaataaaaatgaaaattgttcatcttcaggggaatggtgacataaattgcagttattgcaccagatggaatagagtgcggctgttaagagtaagatactgatggcaaaagatgtatatgagatgtttttatattgaaagagtgagcaacagaataagctataaaatcatttttaaaaagcactgtgtgagatgggttgatcacctgagatcagcagtttgagaccagcctgaccaatatggtgaaactctgtctctactaaaaatacaaaaattagctgggcatggtggtgcgcacctgtaatccccgctacttgggaggctgagacaagagaactgcgtgaacctgggaggcagaggttgcagtgagctgagatcgcaccattgcactgcaggctgagtgacagagcaagactccatctcaaaaaaacacaaaagcattgtatgcacttgtatgacttgaagttgttagatgagtacattagaaatagggtgggattagacaagatgtcactgccacttcactttcttgtcccccatggcctcctctgggacaattcattcttccttgattttcctggccaaagtatcatgcaagccatcccatttttttcttttctccttcccttctttccttttcctcccttgcttttctccccctccctcctccctccctgcccttcctccctctttctttcactttgttttttagagtaacggttttaggttcacagcaaaattgagcagaaggtgcagagagacagagttcctatacacctcctgtccccacacacgtacagcctccccatccatcagcatcgcgtacagaatggtgcatttgttaaaatgagacacattattatcacccaaggttcatagttttcattaggcttcactgttggtgttgtaaggcatccaccattacagtatcatatagaatattttcgctgccctaaaaaccccccatgctccgcctattcttccctcccctgagcctctggcaaccactgatctttttactgtctccatagttttgccttttccagaatgtcatggagttggaatcatacggtgtgtagcttttgagattggcttctttcacccagcaatatgcatttaaggttcatccgtatcttgtcatgctttctcatttcctttaagtgctggataatattccactgtctggatgtaccacagtttatttattcacctactaaaggacatcttggttgcttctaagtgttggcagttatgaataaatctgctcttaacactggtgtgaaagttttatgtgaaaacaagttttcaactccttgggtgaacaccaaggggcacgattgctggacggtatggtaagagtatgtttagatttgtaggaaactgccaagctatcctccaaagcagatgcaccattttgcatttccaccagccatgcatgcgagttcctgttgctccacatcctggctggcacttgttgtagttagtgttgtttctccattctaacagatgtgtagaggtgtctcgttattgttgttttgagacggaggctcactctgtcacccaggctaaagtgcagtggtgtgatcttggctaaccgcaacgtctgtctcccaggttcaagcgattctcctgcctcagcctcttgagtagctgggattacaggcacgtgctgccatacccggctaatttttgtatttttaatagagacggggtttcaccatgttggccaggctggtctcaaactcctgatcctcccgcctcagcctcccaaagtgctgggattacaggcgtaagccatgctcctggctttgtctcgttgttaatctgcatttccctgaggacatatgatgtggagcatctttctatatgcttatttgccatctgtatctcttcttgtgagtccaatttctattttttaattttaatttaacacgcattccccagattaccatattattatatttcaaaagagcattttttttttttttttgagatggagttttgctcttcttgcccaggctggaatgcaatggtgtgatcttggctcactgcaacctccgcctcccgggttcaagcgattctcctgcctcagcctcctgctagcttggattacaggcatgcaccaccatgcctggctaattttgcatttttaatagagatggggtttctccgtgttggtcaggctggtcttgaactcccagcctcaggtgatctgcccgcctcagcctcccaaaatgttgggattacaggcgtgagccatcgcgcccgaccaaaagagcatttctaactaaaatattcgtaattcagaattagtttacccccaaaatcagtattgtatatagtatttagattcttagattagccaacaaaattctgcctcaaacatttctcccataaattaaaatactagtaatttaatgaaccaaatcaaaacaaagactcyaatcctaccttcttgagcgctggcatttgagggaaagcactcattcattcagtaactgtttatcgagtgcccactcagcctgggtctgctgatgtctctttctttaatggaagccttccccacccccaccccggaaaaaataccatctgtttgtggccaggtgagggtggggtttggagggtaaggaatggaagggttgctggagcctgtctgcagatcctgtgtggattagggagcacctggaacagccgccttttgtcccagctgtgggtggcagctgcagggctcaggtggtatctgtggagggcctgctgccagtcccagggcaggagtgccctcatagctcagcttcagtgctgggcatggccggcggtgaatgatctggacctcctgagggcaggcaggttgctttggtgtggagccaggtgttttgcagaaagtgctttaaggtgtaaaatgagagtttccatggaagaaaagggacacttggacctggattctggctgagagatttcctgggtgagyggagaatttgaaagtggtgacacagaactgggtccattgagtgcagtaatgtgataggatttgtttcccccgactttgggagtggctttattttgtcatggagcacacctggtttggcactgtcctgcccgggcagtgaggcctgacgggacatgaccgaagtttggctgtgtttgggtgtgtggcacaacaaggacaaactgctctgatccccakcagtgagtcagggacaggagcagaatcccggtcacgtcctgccctgagccaggcttgccagccctggcagcctcgcctgctgttacataaacggcaggccatgaattccaggtgtcggcacccccctgcatccagagggctcactcctgcagcttccctttccaaagcagcattatttaaaagttgctttctccaagaaaatggtmtttctatcgttgcgattgcagcagttagacgattaatgaagcattttttccctccaaacattgagtgttcccagtttggagtcattttgcttttctttttggttgaatgatggtgattttttttttttttttttttttttaaaagaaacagggacttgctctgtcctccaggctggaatgtggtggcgcaatcatggctgacagcagccttgaacccctgggctcaaccaatcctcccacctcagcctcctgagtagctgcaactacaggcctgtgccaccatgcccagctacttttaattttttttttttttgcagagatggagtctcaccatcttgcccaggctggtctggaactcatggcctcaggtgatccttgttccctagcctcccaaagtgctggcattacaggcacgatccactgtgcccggtccatccttagttttcaacatagatatcaaaaaagcattcagcatgaaccagtcgaaagatgatccttactctgagaaagaaaggctcacgttggaagcctgtactccttagttagaaccaagacttgatttttctggtgacaggaaattctttttattgcagatctctcaaaggccttggttctgacagaaattggccccaaacgtgaccctgcgaccctgaagctgttyctgagtaacatggagcggctgctgcatgccaaggcgcatgggtaggaggttcagttcrgggaacaccctgcagcccgaggaggaagaacggaacacggacttgctaaaactcccctgggatttgaggaggaagcctgrcrtggaaagagtgggaggggcacatgaacatcagactcagggaagcccygtgaggggcccgcctgcagtagatactcctatagccaggcctctggagatgcgtgggcacctgtgttgcttctgatcagaatccatggaactgacctcatgctgctcaaccagcgaatggtgcaaatacttacagtccttcccgagggggcctggcgtcagacaggtttatcaaagcccagtgaatcctctttgtctcttgccttcccagtagggctgtgctgtgagccctagccatgtgagaccactgacacttaatgtcacgttcagtagaggaggattcarttctctggttgctgcatctcaggtgctcagtagctaggtcagctgggagctgtcatggcacaaggcatttgcgtctggcggaggcctgttggttggtggctccaggccctatattcagcctccagagctttggcagaagtgctgtgcttcatttttcactagggaaaatgcccagccggggtacctggctgaagtcggcttgcacaccacagaaaaggctccactcccrcctgcatctgtcctcccttccctctccccagggtccgagtgattggaagctccacattggcactctgccacctggcctcaggggccgcggatgcctattaccagtttggcctgcactgctgggatctggcggctgccacagtcatcatcagagaagcaggcggcatcgtgatagacacttcgggtgagctctcctgtccctgaaatgcagcggcagaaactagactgagagacactgtgggtggggcacttcctgaagtccccaccaactgaatttcccaccttccccagagtttctgtttttttttttttttttttttttttgagacggggtcttggtgtcacacaggatggagtgcagtggtacaatctcggctcactgcaaccatcctactcacgggttcaagcaattctcctgcctcagcctcctgagtagctgtgattacaggtgcgtgctaccatgcctggctaattttttgtatttttattagagacggggtttcatggtgtcagccaggatgctcttgatctcctgacctcgtgatccgcctgcctcggtctcccaaagtgctggaattacaggcatgagccactatgcccgaccccattccacattttttcttttttttttgacacggagtttcactcgtcacccaggctggagtgcaatggcatgatctcggctcactgcaacctccgccttccaggttcaagcaattctcctgccttggcctcccgaatagctgggactamaggcactcaccaccatgcccagctaattttgtatttttagtagagatggggttttgccatgttggtcaggctggtctcgaactcctgacctcaggtgatccactcgcctcggcctcccaaagtgctgggattacaggcctgagccaccatgcccggcctccattccatattttaaagcccccatcactctgattttaccactagagcacctgaaggctcacgtatgtgcaagcaggtctccagcccatgcatccagagctgtttcatatccctcaggaagatgcaaggctttatcrtcttgcccgagcttcttcgagtgtgggtcccgcagcagcggtgcacccccaggagcttgtgggcaggtagcctcagccccacccagacctgttgaggcagagccttggtttcacaagcccctggctgacccctgtgcacagtcaagcttgagaagggcagctcccctgttcgggtctagcccattgcttgcatttcttaggacttttatgttctccatctcttaaggcagtggcagcttcagagccgcactctgttctgtgcagcccttgactgcattcacactggggtggggcgggagaggctccatccctctattctttgccgaattcactcctagaccacctgtttaatacgagtgttggggcttgggcacggttccatgtgccatttcctgtgctgtgtgcatgtgggataagttgttacacaacattgttcagccctctctggtaacccggatgcctggctctctctgtctgtccccaggtggacccctcgacctcatggcttgcagagtggttgcggccagcacccgggagatggcgatgctcatagctcaggccttacagacgattaactatgggcgggatgatgagaagtgactgcggctgaggcaaagctgctcccaaggcctccctgggctgctgtgggctcctggggaggtggccctcgtggcccacgctccatgccagtggctcacgctctgctcctggctaccccagagggagttgtcacgctacagtgagtggctggccttttaaatcgacgtctctctcaccaggatttggtgtttagctgtttctctctttaatctcacgtagcctttttcaggttagtacgtgttcttctgtcagggccaaaactcaaatctcctgtgaaatacgtattgataatccaatcttgatttttccccccagaatataaatctcaggtaataaggctttagaactgctgataaagcggatcgttctcaggccctccccccggagtacttcagaatgcaataaatcaaaataatggccctgtgtgtatctgtttcctctataagcatgtcgcctgattcccaaacaactctgtggctctcatccactgctgtggatctatgctctcaggaagctttgcgaatgaaacccaaagtccatgcgaatgaaacccaaagtccatgcgaatgaaacccaaagtccagtgtgtgccagctgctgcctctgatgaataccctgaaggcgaccccagtaatatcatgtgagtgttcagaagccaagacatgggacagacagaaggaaactaatctctgaaagctgttgtttctgtgatcagcttttttgtttttgtttgagttggggtcttgctctgtctcccagcctggagtgcagtggtgtgatcacagctcactgtagccttgacctcaggactcaagtgatcttcctgccttagccttctgagttgggaccacaggcatgcactagcatgccaggctaatttttaaaaattttttggtagagatggggtctcactgtgttgcccaggctggtctcaaactcctggactcaagtgatcctctcacctcagccttccaaagtgctgggattgaatcaccacacctggccaatctgtgatcagtttaaagaggagaaactgggccttacttgtttctctttaggaggcggaatggtatgtaagaataattctaatgaggctattaactggctggccagacatctttcctgaagtttaagaatgagaaagtcttggctgggtgcggtggctcatgcctgtaattccagcactttggggagccgaggcaggtggatcacttgaggccaggagtttgagaccagcctggacaacataatgaaaccctatctctactaaaaatacaaaaattagctgggtatggtggcgcatgcctgtaattccagctacttgtgaggctgaggcccgagaatcatttgaacccgggaggtggaggttgcagtgagctgagatcgcacccctgcactccagcctgggcgacaggagactctgtctcaaaaaaaaaaagaagaaagattaactgaatttaaaaaataacatattcccagaggttcactgtagggtgagcactgtgtcctgccacgtttggaatcgttttgtctttgaagaagtggagcctctcccagggctggctcggtgcccttgtctttccagcaacagcgttagttatagtcatctttgagactggcttttctttcatctctggagagagcttgattcgtcatcttattgctttgtctgaactaattttgtttagtagagcttttcaataaatagtttggattttttaaatgagtttaaaatatgctcatgtttctccaaattgctgattattcctttaggccttcgttagcccatcttaattttctcagaatctactcaaaacagatctgagtatttatacagatgtgcaagaaatttcttacattctcatggattttgagatgtagtgcttattagtcaaataatatctggaagttttcttcaacaaaataactctcgcagcacgttgagaggctgaggcaggattgaggccaggcattccagatcagcctgggcagcatagcaagaccccatctctacaaaaaaaaacccaaaactagatggatgtggtgcacagctacttggaaggttgaagtgggaggatcctttgagcccaggagtttgaggttacagtgagctatgattgcaccactgcatttccagcctaagccacagaatgagaccctgtctctataataaaagtttttaattagccaggtgtggtggtgcgtgcctgtagtcctagctgcttgggaggctcaggcaggaggatggctggaacccaggaggtcgaggctgcagtgagccattattgttccactgcactccagcctgggtgacagagcgagaccctgtctcaacaaacaaaacaaacaaaaaaacaaaaagaaagaactgcccccctccccaacctcaggaaaggccctcccagcccttgggtcaggacagcaggaggccctgagggagcttgagctgactcctgcttctgcttctgcttctgctctgtccggagtctcaggctgcctttagcaagtattccgcatgagcgtcatycctgcggcttcaggagaagcagagtgaaccttggagaaaagagaggcacccaaggtggggacctgcgggcttgcctcattcatccctggacaagcctcccagaaacgaaatgggctgctcacctctgtgatcctcagagttagcaaaactgcttgctatgtcatttagacctcttacaaaatgatattcatctatcactggtgatgacattcattctgaattccactcataggcttcaggatacttgccctcatttttttttcccttcatttcaacagttttcactgagtgtcttgtggacatgagtcatcaaatgttttgctgcctttatgatccaatcccaaataaaaagtaaaacatttgtcctagtgcatcactgtcaccactcagaccaggagtcaggacgcggattgatgttcaggtagctgtgtggccttgagagggccatgtcagctctcttttggtgccaggtgaagtctgtactgggggyctggctgcctccctcacagggttgggagcatgtcccaggacgacacctaggagagtaccatgaaaccagagaatgacggaggcagtctcagtcagcgttgagatttattttgccaagattgaggatgtgcctgggaaaaggacacaagccactgtaggatctgtggtctgcacttttttccaaaaaggattttgggcgcttcagtatttaaagaggaaagaaaacaaaagagggtatggtctcatccttgattagagctcgttaatccacatactgcaggcaaggagggggaagcggaacagtgggttacatgggggagacggtatttttcctctcctctcatccctcaccgggaagatatgctgttaatttacatcgtctgggtgagagaggccacctgggaagacactgccttctatctctagccattctgttgaggaacaaaaggaaggtcggtgttcctcctgactcagcttccaagcttaccttttcccttgggcatagtgagtttgggggtctccagattttactttccatacacatcaactgtggttggttttttgttgtttttgttttttacagttaaatatattattaaagcatgaaaagatcatgatgtctccaataaccaaatgttattcaagaaaactagaaatatttagattataccacagcttagacaggctttgcctgatttattaagccatttacaatcagttctatcatccatacccargacttccgggctggaaaaatacatcctatagctttcccagtaggaaccacattcatcattgcttttttctgtggaggcaatgtataaatagagcagctttttgaaaacataagcagaggcccaaatcagtggcctaaaacttggatgatctggggaggcaccaggccatctgaaccagcgctttgtccccagcagatgttgggacatgcaggggctatgcatgtcagcacagggggccactcagcagccgggtaaacttgaggtactggcctagcctctctgtgcccctctgtaaaatgaattaaactgcactcctcccaggactgtgtggatcaaatgaaatagtgcatgcacgtgaccacatcaaacagatggacaagaagagcagaaagactgcaggagccaggacagaggacccagagtcaagggcttctcaccccaactgcttcttgcctctttctctgccctggacttcctttcccagtttcagccccacaaattgcttcctctttgtgtgagtgaaggcttcagggtggagtgaagctagtcacttgtagaggcccctgtagaggaagatgaagatgagaagtccatgtagatggcatcaccgagtgccaggactggatgccccaaacaccacaagccatgtcgcatcctgggggtcgcctgggcaggcctctctaccatttagtcactgcagtcagctacagcccacagcagatctaaaacaaaagcacctgtaatctcagcatattgggaggctgaggcgagcagatcacctcaggtctggagttcaagaccagcctggccaacatggtgaaaccctgtctctactaaaaatacaaaaactagccaggcatggtgtcgtgcacctgtaatcccagctagttacatggctgaggtgggagactcgtttgaacccaggaggcaggggttgcactgaaccaagattgcatcactgccctccagcctgggtgatagagtgagaccctgtctcagaaaaaaacaacaaaaaaccccacaaaagcagtgagtgtgggatgggtgacgcagatggaagatgaagacgtaggggacaaaagcaaggggctattgcaaaggatctggaactgcagcttcaaagccaggagtgcagagcccgtggggcagggccaccatcactaaactggaatggagaggccaaaatctgaacctgaagttggaagaagaggggaacaacaccgctggcctctgggaatgggaagatcctaaggggtgactccagtgcccaagttcctatgcaagaagtagccacacaacttcccagagtgtggcatctcacaaggagcagaggtttcagtttgtcactagtcacatgtcccgtcttaccagatgcataggtaaacaggagccctgacctccaggaaccccctggactctgcaggctcacagtgcccgcgtgacagcaccgagcaggccagctggagatgtgaggggggtggggaaaaggatctggagcaggatgttcaggtagaggcagagagaaatggctagggctgcagtgggataaacacgtggttctgcttggctgcaggaggcatcttgttgcttggagggttggggaggtgatgcttaaacacataggccaactcggggccttgggcaccatgtggagcagtccaaactttgtgctggaaacacggggaggatacttgtgatactgcgtgtgtcagtccttctactggagagctggttctaaccatcatcaagtgagaggagaggaagccctcaggtggcaggtgtatctctattcggtgagaatgtcatggttgtcagtcatgctatagggttgccctccagtagaatgatctgatatgtctatgcagaaagtaatttggagggttttgacagtgtctcctgtgggcttctcggactgaataatggaatctcagaaggggatgtcccttagcaatcacctgttccaaccttctgacctccaggtctcaccagtcactagttttgtggtagattgcaggcatgtctggtgcgtccaacactagaaaagtcacggcattggacagggaatcccctgccaaccttgggggaaggagctggcgtgtagggccaagagttgctcaggttggatggtgtgccacctcatagcccttgcccagatccagacagctggcaatcctccatttcctgcccctgcccgaggatggcctcagtcctcatacctgtgcccgctgagagtgtcacatccaccatctggaccacgttccccaaaaaccatctcagtaagggtcagaatggcctgcaactgctgccaactggaagtttccatgctgtgaagtcattaattayccacctgtaagtctggaatgccatcaggtggttccaaggtctccacctttgacaggktggtggctcccagccactcccatgcatcaggcctgcctgtgcacggagggccaagtctgttgggccccttggcttggagaagggtttcactgagatattagtaactgtgagtcaccacacgcagcagttgtgcaggtgtcaggctaaaaagaagctcagataggacccagaacaaatgggctcacttgggactaggcaagggattatagttcaggatgtgtgtgctataatgatggatcagggcatatccagggatgtcgtggcaaagataaatttttatttttatttttttt

SEQ ID NO: 94417 - DNA, 35938 bp, Homo sapiens
gtaggatttctgtgcagtaaatgtcagttcctttgcagataaagttttatttcctttaggatgggtctatattaagagataatagaaaacgtcttgtgtgggagagaggagtttgagaccgctttggttgtcttcaccatgtcctaaggggttgaactgggcattctgtccagagttctttcaccctttagtttaatgacctcaaagttctgtcctgctttcataggtacatacttcaataattgaattttcatgttcttaattttttttgctaatatataaaaatgtaattacttttggggggaggcttattgaggtataatttataagcaggaaagtttaccttttaaatgtacttggtatggtttgggtgtgtgtccccattcaaatctctcatcaaattgtaatctccaatattggaggtggggcctggtgggaagtgactggatcatgggggtggatttccccatcagtgctgttcttctcatagtgagttgcagtgagatctggcaatttaaaagtgtgcagtacctccccaccactcctttttcccactctggccatgtaagaggagcctacttccccttcaccttccaccatgtctgcaagtttcctgaggcgtccccaaccatgagccgaccgaacgaaccatgagccaattaaacctcttttttttttttttttgagacggagtgttgctctgtcacccaggctggagtgcagtggcgcgatctcggcgatctcggctcactgcaaactccgcctcccgggttcaccccattctcctgcctcagcctcccgagcagctgcgattacaggcgcccgccaccacacccgactatttttttgtatttttagtagagacggggtttcaccgtgttagccaagatggtctcgatctcctgacctcgtgatccacccgcctcggcctcccaaagtgctgggattacaggcttgagccaccgcacctggccttaaacctcttttctttataaattacccagtcgcaagtatttctttatagcagtgtgagaatggactaatacaatactgttctatgcattatggcaaatacagagttatttaatcaccactataatcaaaacatagaacaaatctatcacctttctctcccctcaaaattctctcatgcgctttcgtagtaaatacctcatcccatcttgagccccctggcaagaactgatcattttttctctctacagttttgccttttttttttttttgagatggatccttgccctgttgcccaggctggagtgcaatggtgtcatctcagctcattgcaacccctgcctccctggttcaattgattctcctgcctcagcctcccgagtagctgggattataggtgcccaccaccacgcccagctaatttttgtatttttcatagagatgggttttcaccatgttggccaggctggtcttgaactcctggcctcgtgatctgcccacctcggcctcccaaagtgctgggattacaggcgtgagccactgtgcccgacctatagttttgccttttctggatgtcatatgaatggagtctattatatgcagcctcttgaaaggggctttcttcacttgagagtcagatgtgttgctgtgtgtatcagcagtttgttctttcatcttgctcagtagtattccattgtatggatatgctccaggttgcttatccattcatctgctggaagaaatctgggttatttccagtttggaataattataaataaagtgactacaccactcacatacacgttttagtgtgaacataagtttttatttctctcaggtaaatatctaggagtgggactgctgggccataagctatatgtatagctagtcttatcagacaccagtaaactgtttaccaaagtggctgggccagtttgtattcccacccacggtgtatgagagttgcagttgctcttcattctcatcagcatttgatatttccaggtgtttcaattttagacattctaatgggtatgtaaaggtatctcattgttggccaggcgtggtggctcgtgcctgtaatcccagcactttgggaggctgaggcggcagatcacaaggtcagaagttcaagaccagcctggccaatatagtgaaaccccatctctactaaaaatacaaaaattagccaggtgtggtggcacgtgcctgtaatcccagctactcagaaggctcaggcagcagactgcttgaacctggcaggcataggttgcagtaggccgagactatgccattgcactccagcctaggggaaagagtgagactccgtcttaaaaaaacaaaaaggtatctcattgttgtataatttgtatttccctagtgattttatatatatatatatataatattttagacaatgtctcactctgttgtccaggctggaatgcagtggtgcaatcacagctcaatgcagcctggacctcctgggctcaaagtgtttctcccacttcagcctcctgagtaactgggaatacaggcacgcaacagcaaccccggctattaaaaaaaaaattatagagaaagggtctcattatattgcccaggctgggctcaaactcctgggctcaaatgatcctcccaccttaacctcccaaagtgctgggattacaggcaagggccaccatatctggcctcttagcgattgatgagtatctttatatatgtttggttgctaaccatatagcttctcttattacgcttatttcttcatatgtgatatatatttttatgtactatatttttgctgataatatataaaaatagaattgatttatgtatattaacctggtatcctgagaccttcctaaatttacttgttagttctagtagtagttttgtcagttcctatgatttctgtataaaccaccatcatgtcatctgaaaatagggacaattttacttccttttgaattgttacactttccatatctttttcttgctttgttaatggttataaactacagacaaatgttaagaagtggtaagatggggcatccttgccttcttcctgatataagggggagagtgttcaatatattaccactaagtctgatattggctatggatttttcatgaatgacctttactatattgaggaagtcccttctaatttttttggcagtttttatgagtagggattgaattttaagtggtctttctgcatctattgtgatgacaacagtttttctttttcagttaatatggtgaattacgttgattggttttagatcattaaatacaacttgcattccttgcattggggacaaacccaaattgatcatgatgtattatctttctatatactgttggattcaatttcctaacattttattaaagttgtttttgtttctatggtcatgtggtatattaagctgtatattaatttttttgtagtgttgattttatgttatgcgggttatgctggcctcaaaatgagaggaaaactgtttcctcctctattttctaaacaaactttgcacaagactggagttcttccttccttatgcgtttgataaatttgaccactgaaaccatctgggcctggaattatctttgtgagaagtctgttgaacaacaattcaatttctttaaaaatgaaaagctattcagatttttaaattctaccctatttcagttctgataaattgtcttttttatagaattggtgcgttgcatctacattgtcaaattaattggcataaaattgtttataatacctcctcatatatatctacatgatctgtagtaatacccctatttttgttttattgtcttggccagtacaggaggaattctcttactctctctctttctcctctctctctctctctctctccagttgaccttccatggccatgggttctccatcagtggattcaaccagccacaggtcaaaatattaaataaggctggggcaccatggcgcacgtctgtaatcccagcacttcgggaggcctaggtgggtgggtcacctgaggtcagcagttcaagaccagcctggccaacatggtgaaaccccgtctctactaaaaatacaaaaattagccgggcgtggaggcgggtgcctgtaatcccagctacttgggaggatgaggcaggagaatcgcttgaacctggaaagcagaggttgcagtgagctgagatcgtgccactgcactccagcctgggcgccagagtgaaactccatctcaaaaaaaaaaaaaaaaattaaatagcaattaaaaaacacaaagaagcgatatagcataacaactgtttacacagcatttatatcaggtattataagtaatctagaaatgatttgtactacagaatgtgtatagtctatatgtaaatattatgccattttatgtaaagaacttgaacactggctggggtgatgttctggaaccaataccccatggatacggaaggacaactgtatatacacctgcatatataaactatatatttacaaggccagaaattgttgagggtgcccagcacagtaactggcacgaagtaagtcatcataatagttgtattagcgttgccttcataggtggtgatttggagaatctattctaggtgggtacagcaatggaggctttggtccagtttgtctagggtcatggtggtgagaaatagcagacaagcctgaaaggatgatttggggctttccttgccccaaagagagagagagacagaaaatccttgcaccggatgatatcaatgctgtgcctctgaatgtccatttggaaagccagtcctgtgcttccaaaaacaggatattcaacaccttgaagaggtgtggtaattgcacatcttactttttacgttttaggaagtctacagagagtggggctgaaaagtttgggaagaacaggtaggcatgtggggagggcaaaagaacagaaataacatgcacaagcatttttctaggaaaattttagggaaagctaagtgatgtaaagttacacttaaaagactacacattttcggccgggcgcagtggccgaatcccggcaaaagtaatcccggcacttttgggggccgaggcctggggaacacgaggtcaggagttcgagaccagttggccaacacggcaaaaccccgtctctactaaaaattagccgggcgtggtggcagacacctgtaatcccagctactcgggaggccgaggcaggagcatcgcttgaaaccggaaggcggaggttgcagcgagcccagatcgcgccaccgcactccagcctgggcgacaagagcgaaactccgcctcaaaaacaaaacaaaacaaaaactacacattttcgcactttaagggctcaacggctgtattcccactcctttgccactctctttgctcttttccgctctagaaagaattaatgaactggatcaaatctaagttctccacgttacagatgggaagcctccgggccaaggaggccaatggttacacaaaccaggtaagaaaataaaatatgcccagtaagttcataggaccggcgggcttagatttcgaatgcgcgtgactctgtcaactgtggacttaaccctatgcagagattagaggagagaatagtcaaacacggataagttaacatttaccgaacagtccgtcctaccctggggtaggttttattaacagtctcgttttgcaaaggaagacagctgccagttgtctcagatcgcacgggcatgccgcgcagatgggcttctgagcagctcagggccagccagaggtctggcgagaagggcgtaattaaacgaacccgcgccggtttcctcagggccccccggggctccgcttcgccccagcgggcctcggcggggctgggaaaccggctgaggttcgcctcacggtggggaggagcgacgggaggcggaagcccttcggtccgggccccgcccccgcactcgccctcgccccgccgcgacttcccattcgccgccaacccatgtgcgttggtgacgtcaccgcgttcaccagcccggaagtgcgcgtggcggcggtggcggctgcggcaacagcggggccggtaagcgggcgcgcgccgctcagaggggcagagttggtggcgtgagttgctgccccttccttcctgctgtgggccagaggcgccaccgcgcccggtcctcgaggaagacgggagcgggacgtggcgagaggcctcctcagcagtgggcaaaatagccccgacgcggaggtcgtgtccccgccacgtttccggcgaccgcaggcgcggattccttggcttccctcagcactttcccctccgcgcggacggccccgagacgctttttcactgggccttgtcgccagcacccggcgtggggggtgagacgcgccttttcagggctggggttccccagagcgttttcctaagtcgaggcggaggtgcgaggaaactgagtgggtctttccgccccacgtggcctgccgggaagcgcggctcctccacccgcttccgtggaatggaatggtttttctctgcaggtttacaccggggtcactcgagagctgctgcggcctccttatgggcaggacccccgtwtggggagaacgaggatgtgatatgtagaagggaaggccgcggtgtgccagaaatcagaggagattgcaagatggcaggaaaagaatcaggaaaatgggggcagcaaaactaaattcatgggaaaatacaatgtctaggagctatcccagggtcgtgaatcctcgagtgcaggtggggaagtagggtgatacccacctgtgaccatgacaagttttggagaccagaaactcggwtagagtttctagaaccccgcatccctctcatactgcctgaagmcctsctctggggagagtgtcatcacagtaccatgtggcatgcgagtgtcgtggtaatgctccccgaccaaaccaccaaaccgagggttgggctgcttattctcgctgcccaataatgagatgcagataaactaggaaagaaaggagtttatttctgtaaccaggtacggggcgaaggcgtggaaaatatcccagaccgactcagaattacagagctttccagagcttatataccttgtaagttgtatgtttatgtgtaagtgtgcattgatctaaagatacaagtgattaacttcttacccataagatctgagtcctgaagaccttcctctggagcctgagtaaatttacttaatctaaatgggtccaggtgctggggtgattacccttatattctctcctgctaaatcatggaggtttggggagttccctcagacccctaataaacttgttcgtggaggcctggggagtttcctcagatccccagtaaaacttgtttaattctaaacgggtcctgttaagaattcctttgtggccgggctcagtggctcacgcctgtaatcccagcactttgggaggctgaggcgggcagatcacttgaggtcaggagttcgagagcagtctggccaacgtggtaaaaccccgtctctacccagaagtataaaaaattagccggatgtggtggtgtgcgcctgtaatccctgctacttgggatgctgaggcaggagaatctcttgaacccaggaggcaggggttgcagtgagcygagatcgcgccactgcactcccgcctgagcgacagagcgagactccatctcaaaaaaaaaaaaaaaaaaaaaaagaattcctttgttattttatcatgcttcaaggtccaggaaaggcctaggcaaaactcttggggggcttttgttacattctagccttgtttaagggcactggctsgctctttcagcttttaatatgtaactcaaccagtcagtcagtactgaaacagttgttatggaggcctgcgctagtgagaccccgcctgccacagtaagtgcttctggagaacaaaaccaggtagatacatagacctagtcgtaatccctcaaactgacaccgttttcagttttttcatctgaacaagagatgaatttctgagttgataaacttgaaatgtgtccccctttgttttccttcmcttaccttcacttttaatttcattggtatgcctgtgtatttgccttgtagatgtgtagttggtgactgcctctccagatgctgaggtgcctgtatcattggcacaggccagtgctgaaccgtaggtggagtaggctgtgccttcygaagcagtatctattcacaatgaagttgcagtctcccgaattccagtcacttttcacagaaggactgaagagtctgacaggtgagagattaggataccttttcttgattggaaacctrtataaatggagaagtagagggttaactttttaagccagcattcggatattttcatygttgttttaattatttttattaaaaaacgtaagtagagggtctctttgtgttgccyrggctggtctcaaaactcctgggctcactccttggcctcccaaaatgctgggattacaggtgtgagccacggtgcccaatgtgcacgttttcattgttggaaraaaggcttggctgggtgtacccagcctgtaatctcttggggaggccaaggtaggaggattgtttgagcccaggagtttgaggctgcagtgagctatgatcatgccactctagcctgggcaacagagtgagaccctgtctcaaaaaaagagaaaggaatattaaaagagaaaggcttacatatggctgatccaaaaatatagctaaatcactggaaaaggcaagaagttgactgcagtaaaaagcatggcttttctgtatgctgtgctaagtacttgccattcattacaggactggtgctactaacttaatgagtacgcacattttgacctgttaygtgaaaaaggaaacagattgttaggcatgtgaagtgctttgmctgtgtttctgtaactactaactagagagctaggtttcgaacttacgcagattgatttcagagcccagcttgcaaccgctaagctctgtttccttcctaggtataaatgctttccatgagaactgaaggaagaaggaaataggagttgcctccattgtgcacgttgcaaaacctgtctggaaggagcataggaaatggctttagctaagtgcctgactccagtagcttcttgctgttgccacagtttcattagtgttgattctcaatgttgtctgctgatgttgctaaagcagccacacagtagcattacaaagcctgtgggaattttaatagcaccttcataaatatatttagtagtatatgtagaaatatgacctatacagcactggctatctattagattcacctggggagcttttaaagcacacatgctcgggttctacctgcagcctactgaattagaatctctgggtgggatgaccatctatatttttaataaaagctccacaagttaattctgatgcacagaagatagacgaaccattactttaacatgactcaccttgtattagcttattctcaaagctactttcccattcttgaaattggatgatggctttttaggtacgtgccagagataaatggcccagaatatgttgattcttttagattgttttaggcagactttaagtagagggcttaaatgcatgtttggttttgccgatgcttcactatcttttttaattggagagagtgaaaattgctaaaaattgctgtccaatagaaatttatgagcccatatgtaatataaacttttttactaaccacattaaaaagatagaaatggtgaaataaattttaataattatttttggttcatctaatttaatccaatatatctaagatactatcagtatgaattttgtataaaaattgttaatgaggccrggcacagtgtctcccacctgtaatcctagcactttgggaggctggacatggtggctcatacctgtaatcccagcacttttgagtggctgaggtgggtggatcacttgagcccaggagtttgagaccagcctgggcaacaygstgaaaccccatctctactaaaaatatgaaaaataggcaagcatactgatatgtgtctgtrgtccctgctacttgggaggctgaggtgggaggatcactgaagcctgggaggggggcttgcggtrrgccgagattgtgccactrcactccagcctgggcgacacagaccgtgtctttaaaaaaaaaaaaaaattaatgagatattttatattcttacttggaagtctttgaagtctggcatgcatttaatacagcacatctgaattcagacttaccacattttaagtgctcagtaagtacaagtggctgctgtttgaatagtgcagattttgaagctgtgattttgggttgagttgaagcttttttctttctgtgtatgcccttcacagcccccaatttttcaacttcaattgcaagaggcctcttggaagaaggagtagtaattaactcttgatggcctaactcaggtcattctgcattttttggaaataaggttctaaatattgattactatagtttcttgaacatcattttaacaattgtgtttaacgttctaaacctgaaactggctagccatatgtagaaagctgaaactggatcccttccttacaccttatacaaaaatcaattcaagatggattaaagatttaaacgttagacctaaaaccataaaaaccctagaagaaaacctaggcattaccattcaggacataggcgtgggcgaggacttcatgtccaaaacaccaaaagcaatggcaacaaaagccaraattgacaaatgggatctaattaaactaaagagcttctgcacagcaaaagaaactaccatcagagtgaacaggcaacccacaacatgggagaaaattttcgcaacctactcatctgacaaagggctaatatccagaatctacaatgaactcaaacaaatttacaagaaaaaaacaaacaaccccatcaaaaagtgggcgaaggacatgaacagacacttctcaaaagaagacatttatgcagccaaaaaacacatgaaaaaatgctcatcatcactggccatcagagaaatgcaagtcaaaaccactatgagatatcatctcacaccagttagaatggcaatcattaaaaagtcaggaaacaacaggtgctggagaggatgtggagaaataggaacacttttacactgttggtgggactgtaaactagttcaaccattgtggaagtcagtgtggcgattcctcagggatctagaactagaaataccatttgacccagccatcccattactgggtatatacccaaaggactataaatcatgctgctataaagacacatgcacacatatgtttattgcggcactattcacaatagcaaagacttggaaccaacccaaatgtccaacaatgatagactggattaagaaaatgtggcacatatacaccatggaatactatgcagccataaaaaatgatgagttcatgtcctttgtagggacatggatgaaactggaaaccatcattctcagtaaactatcgcaagaacaaaaaaccaaacaccgcatattctcactcataggtgggaattgaacaatgagatcacatggacacaggaaggggaatatcacactctggggactgtggtggggtcgggggaggggggagggatagcattgggagatatacctaatgctagatgacacgttagtgggtgcagcgcaccagcatggcacatgtatacatatgtaactaacctgcacaatgtgcacatgtaccctaaaacttagagtataataaaaaaaaaaaaattaaaaaaataaaaaaaaacatatacctattgaaggaaaaaaaaaaaaaacacaaaaaaaaaacactggattttctccaccctgagaaatgaggtcctaaggaagttagagcctaaatggtgtggtaaggtaraggtggtgattgcttccagagtcctgtccttgaaggactggcaaatgagaacatggatatattctaaagttgactttttctaggctactggagaagtggcaagaatggaatcttttagtgcaatgatcaacaagttagaatgtcaaagacttgggtgccctggtaaaatgtaatgttctgtataaaatcaaaatgtacaaaaacacacagcctttctgatggctgctatatagtgatacttggagtttaaatcctgtaccaattttcaaatcttaatagctgctttgccatgtgtaaaattagttttcagtatgcaagaatatgagagactagaatagtgtattattgtcatatcataagggttttataatttgtcaggttattttatgtatctttttgcttcagtacaatcatatgctagtggcatagaagattatttcccagctagctgyggtagctcatgcctataatctcccagcactttgggaggccgagatgggagaattgcttgagcccaggagttagagaccagcctgagcaacatagtgaaatcccatctgtacaaaaataataataataaatttagccagttacagtgatgcacacctgtagtcccagctactcaggaggctgaggcagggggttccttgaacttggggtcarggctgcagagtgagctgtggtggtgccactgcactccagcctggatgacagtgagaccctctctcaaaaaaaaaaaaatgagagactatttttctgtcctagagatgaggctgaagttcccaatgcagacgatttttgcctgagctaacagcattaatggatgagcaaggacttgtttagtcctttggctgttgtccacagggggtgatagcgctcagtgttatgtgacgtcagaaggccatcatgttaaaatatagcacgatagggacaactgatcactctcttgaagtccggagctcttagaacagatggtctgtttttctgtagtaatgctcacaccatgtcttcccactcatagctcccactcactgccccttaccccaccccagcctccagtcgtcaaaatttaaagctgtaaagggaagacgttcatgaaaatttaattaaaagttaacattaaaaagaggtgacagttataaaagttttctgacacattaatgtatggtcttttgaattgctaataataattaacaattgcttactatcagaggtggcatttggagcaaataaacgtagtttggggatgatgagattctgcattctttgacttttaggcttaagtttacagttaaatttagttacattaggtgttattttcactgaattatttcattgaatgtagctcgcaaagtcttttgaaatgttgactgcctccctgtttctgtaagattgaagatatcagtaacaggaataaataaatcttgaagcttgatagtccctgctgttttaggccaatgtgaaattatgcttttcttataatttttatgactgctctttcatatagacaaatatgccttgatacgtctttctcagttgtcttaaatgttattttaaaaatcctgaatggcaaggtttttggaatggtttaataacataggctaatcaaaatggtgaatatattactttgagttctggatctctttgtaatgcagttagcttactgagtaaatttgaacttatcgttttattttagtaaagccagcatgagaatcttaaaacagtagttatctgtataaattaagccttgaccttcttcatcccactgtttatagtaagttcaagtgaaygtaaaacttgtcctttatttgcttgaatttcagaacagctacttgataccgttttaagaaaacttaaaaaaacccaatacttaccagtgaagtcattcttttttttaatagttagaatatcataattcagtttaattatgagccagattggtataaagatgaataagataggttttctaccctgagaagtggggagacaaagacataaaacaggtaattttaatataattggtatgtataaagatawgctgtactagtcgcttagaagaaattcacctaaccttaccttcaggtgaggcttcctaaagtgagtcacaacagataagtaagagtgagctagatcawtgttttccaactgggtagttacctcttagtgggccatgaagtcaatttagtggtcatgaccagtaattaaaaaaaagagagaatagaatagattgcatggtacgaagggtaggttttcttttatgatacttttgtttgccatgtagacatacaaattttggtgactgctatgtgaatgtcttagtgtgggttatgggmtaagaagtgtgacagccagccactgagctggagtaagttggggaggtgtttcagtgaagtgactcacacaagcaaaattatggaggaaaactgtggggagagttttgtgcagacagctggtacagacagtgtgatgcagagtttagcaagagatgagacaaataggtcatggaagcctttggatatagcactgaggaatttgggtactgtgttgtgagtagttaggaggagcagttaatgcgtagcgtaattaacctagtgttttaaatccctaygtctagatggtggaggctggatttaagggaggtgatgtggtcccagaagtgggctttsatgggaaatgtggcattaggggaatatgaacacttccccttggggagagcttgtggaaaagatatccttaattaagtcaagagggtagggagcatttgttacttttaagtacatcattttaaggagtctacagagaatggggctgaaaagatgtgggaagagtaggtggaagaggagtgtgggcaggacagaaaacagatgttgaggtagggatagaggattctgttttgagttgtgattagaggtgctggaactttgatgtatgatgagtttagttgaatgctcgtgttgctgtctgctagccaaagaccaacagggacacaagttgggttgttactcctggcagtgaggagcaacatgctgagtgaggagtagcatgctgacactggagaacctggaggtatactcagtaagagggctttagaaatgacttcttataggagttgggcttgtattgggtcattttggagagcatttaaggtagtagagctttgcagcgggttagatgctctcaggaagcagaagtaattctgtgattgggtgtcttaataatggtttcctagaagttgagtacagttgtgagactaaacctaattggtaaggcacagtcactgttaccaactattgtagggtgtatcatggacagtgttcatgtttcgtgtatgtttaggtgattacagagttgtcttgatcgatccatcgtggtcacagaatgggcttgtctgatattgatgttttgtgaaaatgtttctgtaccacagaccccagggcctaatattgtggcaggctagctcckggatgccattctcactaggttccatgtggacatatggatatagttatagtggattttgccttatcctctacatatagaggagtcagctatgtagttgcttatagttgttcagtgttcaaatggttctacctagagcacagataggagttgattttagaattatatacagaccatttcttgaagatttttagctataaacattaatcataagtggtatagactaatgtctgatagtttcatgcgtgaacatcctgcctcaacatctatctgtaaacacagagaaatacaagaacatgttaccatttctaaagtatgcacataaatggggaaaagaaagcagaattgtttratttactttctttttttttcttttttttttttttgagataaggtcttgctctgtcacccaggctggagtgcagtggcacgatcatagctcaccgcagccttgaactcctgggctcaagccatcctcccacctcagcctcccaagtagctgggactacaggtgtgcgccactgaacctggctatttttattttttgtatagatagagtcttgctctttgcccaggctggtcttgaactcctgggctcaagtgatcttttcacctcagcctcccaaagtatcaggattacagatgtgagccactgcgcctgacctgctttagtctttagtaatacttcaaatttatattgatcactttgaggcattgtggaattctgaattatcttctgaataagcaaagaattctgcaagttctctgtttcctgttggtcctcagaggcactctcctgtagacaagtctttttacttctttgggccttgttctcatttttcatatgaaaagcctcagttaaatgaatctctgctgttccaactagatggaaaagccttgtacttttgtggttaaaataaacacattgaaataaagaacttgggaataaaaatcktattttctctcatctcagaattatttgtcaaagagaatcacgaattaagaatagcaggaggagcagtgagggatttattaaatggagtaaagcctcaggatatagattttgccaccactgctacccctactcaaatgaaggagatgtttcagtcggctgggattcggatgataaacaacagaggagaaaagcacggaacaattactgccagggtgagtcaaaagtttgacaggtaattacattgcttttttggtaatttttaaaaacttaattttctctagttaaaagcaaataacgaaaagtctaataaaaaagtcagtctcttctatgcccgtcwtaaaccctgcagtcctctgttcttgcagccatgtttactttttatgttacctctccatttctaaaaagacctttgtatgctacgggtatttacttttcagtttttactatcccagttttaagatgtgttacgtattgrctttccataagggaagatgatttagctttcttaccacacccttctcaacaacaagcacgtataattctccttcttctgtcttcctagtatatttatatcataatttttggttaagtcaatattcagggttcacgtttatgactctgtattgtttacagccagattgtggagtatattgtgatgacatttcttctattggcatgtttttaaattttcctgcagttaatggcatttttcttttacataagctttccatatactaccaatttattcctgcactctgtgccagagctatagagttcctctcaaaagatttaaacacattatatcaagtttcaattgggtttttgggaaacatcttacctggtgctgtcttcctgctccaatatggacttttaggaatttccttggcctctcttttttgttaagcctcctgtttcctgggtcccatgtgctgttctctcttggcttaagccctcattttaataatccaaaacctgaggaagccttacacgtctgaaaatgtttttatttcacctccatggtggtttgatagttacggttatagaattctaggcagggaataatttttactcagaaatttaaaggtattgttttctagcttccagtactgccagtaagtctagttccatttakatttctcttttgtttaaaaacctgattgccattatttccttttggaagtctttctgatcttttcatgtctaatgtttttaatttcaagatgatataacttgttttggatttttcayttactgtgcagggcacttagtgggccctcatgtttctttcataatttcatcccttttgttaaatgctttttcctttggaaactcttattatttggatcctggattgctgggactgaccttctagttttatcttttgtctttattttatattctcctgtcttactttctatgagagtgccttaacttcatctcccagtcattgtataatactgacaacttctgtggtcttgtagaatttcaagaggtctttcttagtatatttctttggaaagcttcccgttcatgtttcagatggaagatcttttatttctcttaggatatctactatagttattttgacagtgtctttgtttcctccgagtgttttctttcaggttggctttccttgaatttgggtgatgctctgtatctgagggctttattgtagttttgcatgggaagtgtcagccaactgggactcccagtctaagtctcagtaggagttttcattaggagaaatcagagaagaatactccagtattatgccagggaaygaacctgattgttagcatcttgaaaccaagtagggaaagggatgagggtcatgttaattttcacttgaatcttgttttcattatgatgcttcattcccatgagcatctgtgcctggtgcaacaagttctgattatttttggttgaacctttctagagaatcagtccctggttttctgcctcattaagggagtcattctaggtgggtctgattatttcttaaaatgagttkcaaacagttttcctatttcaaaccttaccttattctttgccttcagagatacttgtgcctcaaattcttgagttctggaattctatagtgagagatagatgtagcttgtatttagagaagagtatgtatcaaattgagagaaatcctacaacagacttctggtgatcgttaacggctttcacttcctaaataaagacattcctaactcttggcacataaaacactttattctctactcctaaatgctaatatgctacctgtcagatatactttctcttttacatatattcctcttcctccaccgtgcctttggtcatctcttctcttcatttgaagttttyctaccacacctgcatgtacraaccctgctgctttttcaaggcttggcacagacgccaccctawcatgaagttactcagcttccccagctggaggtagtctgtcttcccaagatagaggtaacyctttattttaatttctttctttctcttttgagacagggtctcactctgttgcctaggctggagtgcacagtgtgatctcgactcactgcagcctctgcctcccggggtctagcgatcctcccacctcagcctcccaggtagctaggaccacaggcatgcaccaccacacctggctggtttttttgtatgtttggtagagatggggttttaccatcttgcccaggctggtcttgaactcctgagctcaagtcatctgcctgccttgacctcccaaagtgctgggattacaggcatgagccaccacccccagcctttattttaatttcactggggattatcagtaagggagttgcaagatctgttaactgtacttattctttatcagtctttygctcaatggcawatgttccataaattgacattcacctctttgcaaactggagctattaaaaatatttctgataatagcttgatttgaaattgaagaacagttttgagtttgatgtggagtttctccacatcacttggcagaggtgacatgtttgtgtgttaaactcatcttttttaatcatgatggatwtttttttaaaaaaatcagtcttttgatctgtttttgaataatgtggatatctttctgtttcaatgtttaggtatggtagttgacgttaaaaagactataactgtcagggcttatagtaccatccctttataaagacaaaaacttatttttttcaattcagtagtatgaaaacctaatttaaatgacaacaaaaaccccatgtatttaattgcagcttcatgaagaaaattttgagattactacactacggattgatgtcaccactgatggaagacatgctgaggtagaatttacaactgactggcagaaagatgcggaacgcagagatctcactataaattctatgtttttaggtaatatttgcagataaaaccatattgtgagtctatcagaatgccttcttttcaagtaaaacctacattctggaaatgttcttcaacttgagaagttgcattaatttcttctaagagatggtttagcagattgcttcaaagaatagtccctcagccgggcacggtggstcacgcctgtaatcccagcactttgggaggccaaggcaggcggatcatggggtcaggagatcgagaccatcctggctaacacggtgaaaccccatctctactaaaaatataaaaaattagccgggcgtggtggcggctgcctgtagtcccagctgttaggcaggagaatggtgtgaacccgggaggcggagcttgcagtgagctgagattgtgccactgcactccagtctgggcaacagagcgagactccatctcaaaaaaaaagaatagactctggagccaaaatccctgggttcaaattctgactccgtcactcactagccacaaaacaaaaacgttaattaatattggcttcctttgtacmgctgttgtgaggtttaagagagttaattgtaaatgcttagaacagtgcctgacacatgtacacactcagtcagtgctaacttcttaactgcatataaacatgatttcagggaagagaagtgcacacacacatggtacatgtacatactccacacacatctacacacacacacacccaggatcattctttttcctttgcactatctttcatgcatgtttattcaatctttcttctgcttccctggcaaacaatggtgaatgacttcagcactttttactgctgagcctacacacaacctcagattcttttttagcattgtattctaggaatcatcaataatcagagttggtatgtaagatgaaacctatttatttcagcttaacttttttgtttaatgaaagcactgggaattatatgggggctagatacgaattaggttagtgttttgatacattactgatgcatcatatgttgtactttaaagttaagacaagccctttatgtttaagattttggattaaaaaaggatgaaacatccactgttcataacctagtttgtagcaatagtagtggtaaaaggatgaagtaataggatttgcttcatgcatagatgggcaagaagtttataagctaaggtggcatctcttgctgattacagtaatgacagatacaatttctagggtacctactgggttctaggtacaacattgggtacctgatatactttatttcattaaactctcagaaaaacttcataaagtatgttaagcccacttgatagaagaggaaacttgagactgagagatattaagtaacttagtttaagtcacagagaaccatgattttggcttgtttccaaggcctaggcaatatatgaccatagagagcccaattggtgcatttttctctcagttaatgtagtcagagctccaggtatttatttattctcatatttactcatagaggaagctgctccaaatagtgcaatatagagtcttgtctaactggcttctcataagcatactgaaagagagaaactaatactctttttcagtgtcctagtttataaaataaaagytgttcctattggtactatcattttctgacatttactgaacccttataacatgtcaggcactgttctgagcacattatgtaaatttaatctcctgacaaccctgcgaagcagatactgctatttaaccgatggtaacttgcccaaagttgcacagcttgtaaagtgtaggatcagaattccaactcaggcagcctgactccagaggtcacattcttaaccactacattattccctgcaactcarccatatttcatatttttatttactgtattttaaaaggatgatattcagagcaaaacaaaatacacaccagtatgatgcttactaagctttgtgtagttttctatcctggctttttccaagccttattggatcaagcattcatagttctggcatttatggttggttactttgcttcccaaacgcttatttttgctttgatcatattcctatgattttttcctccaaattttgatcttgcctttaggttccccagggayggttacaagtctcttcattaggagaaataacaccaagatggatataccatattatttgctactttgtgatcatatttttgcctatttacatattttctttttatcattttcttttatgtctttttgaatctggagccttcgaaatttgccatgtatgtcaagatggttcccttttaaaagttactatgcatataaaactattaacagcttsgraagagttaagcattaagtgtgaacttaccaatgtactgttgcttttgggataatcaragaacattcaagttcaaacacagccaagaggtatttttgataagtagttgtcagtgcctcttttctgtaatgctacagagtgaagtatctcatagatcactgacctccccatttggtgagctgaatggtgtctgtgtttcggctctaaattcctttttctatttttttaagtctccatggtaaccaactgtcttagtttgcctgagcttgaartacttccttggatgtatgattttcaactttaaaactaggaatgtctcaggcaaaccagtatgaagtggtcactctactaattaatacttgaggttttatgtacatatatataaaattagttttatgtcacttttttcrttcaacatatgagaacatttgtttattaccatttttgtgaatggctaatagattaacatggttcaaaattcacaaagttttaaaggctctacagtgaagtctcctgatctgtaatgaacaggactgcccrtttaaccacacccttgctaacactgttatcaagtgtttgcatcgttgccgatctgaaagacgytatcttggaaatgggtatttactggccgggcatggtggcttatgcctgtaaccctagcactttgggaggctgaggcatgcagatcacttgatgtcaggagttcgagaccagcctggcccacttgccgaaaccctgtctctactaaaaatacaaaaattagctgtgtgtagtggcaggtctacttgggaggctgaagcaggagaatcacctgaacctgggaggctgcagtgagctgagattgcaccactgcactccamccagggtgacaaagtgagaatccgcctcaaagaacaaaaaaaggatttatgactaaggttgaaaatcttcattattaaagagatttctatatttcctttataggtagcctatttttctatttacgtggcctttttattagaacttttatatattatggaaattagccatttttaaaatatggacttacatatatttttccaaaaatgtcacttatgactttgtgtgtgatagtagtttctgccatacaggcatatttcattttttatgtcattcaattatttcttcgaaaatcctgttgtttttgtgttgcgttttctgttttcttgctgagtttgaaagatcttcaagattataaagattccaagattaaaaatattttcctcgtttcttctgttaatcctgttacgtattttttccattttattttggctattattttcccatattgtgaaaattagcttgtatggtgtcttgttggctccactccacctcatacaagttttgcatatttcttgtttagtttattcttggattatctttttagttgcaattgtaaatgcagctaaacagactaaaagacagtcttttattgtcttccatttgatagttgatatgtatgaatacgtatgtgttttaataactgttcactctgctgaatttttactgtttgtgatagtgtttagctgattttcttgtgttttcaaattcttatttgccaatagtgatttttctccctccttttctaatgaataggttttgatggcactttatttgactactttaatggttatgaagatttaaaaaataagaaagttagatttgttggacatgctaaacagagaatacaagaggattatcttagaattttaagatacttcaggtaagaatttttaaaaataaaaaatgatagttttaatatcatgactagagcataacagtggtcatacgaaacccacagcaggtcagtgtacaaaatggtgacatcccaaatgtctgtctccagtggagacctagcaccctatgacttatgagtgaaaattacttagctacttcatattgtattttcattcccagaacgcacatatactttatgtcatctttcctacaattttaagtcatctttttaaatgtccatttttctttttgattgatatttcctccattgatttattaattacacagatgtttgaatgcttaccacaggkcaatccctgtgttaggtgcattaaacgtggtaatgaacgagtgaaagtgytcsccttcatacagcttacggttttaggtagtcatggaaatcggtgatggttcacaacaaaatgattttggtgaaaagaaatacctgttatatgatttaaagaatcaaagcataaagacataatygaaacttggatgggccgggtgtggtggctcacacctgtaatccccgcactttgggaggccgaggcgggtggatcacgaggtcaggagatcgagaccatgctggctaacayggtgaaaccccatttctactaaaaatacaaaaaattagccaggcatggcggtgtgcgcctgtagtccgagctactcgggaggctgaggcaggaggatggcgggaacccgggaggcggagcttgcagtgagccgagatcgtgccmccgcactccagcctgggcgacagagcgagactccatctcaaaaaaaaaaaaaaaaaaagaagatcttggataaacttggtaaatatgaaacgcatgactagttttgtgggtagcaatgatgtttaaatgtcacacactaacctttttaaaaaactatccgaattggctagtttatgtcaagtaatattcatttttcactggttgggattgctctcagaatattctataacagaacatggatattttgtcaatgtagtttctctaaacttgagtatttgtagtctgtcttataaataatagaacatagattaagacttagctgtatttgtatcactaatccagatttagcattaatttacttatttagcatcactttggaccgctgatgaattcattagaattttaagggcatgagagggaaacacatgcacgttagggcttccagttctaagattccgcgaaatatactccagggtgcgcaactagatgagtcgtatttgaaggttttccttgaaagtactaatgtgtacagacaggcaagctttgaggaattcagactactctgttaaggcactgcagtcttgttttggtttgctgcctttacaagaatgctgttttttttttcatctagtataagtgccaattcaggaattgcatttgatgaccattcggaatgtcttgagtcagtaatttggaagtgaggtggagaccttgaagttttagttcttgctaacctcaaaaaggctacttatattttattcgatcctgggttttcttatctgggaaaagaaagaggaggtggagaaatgaccagttgctttctaaggtcccttctagacctaactaattatatgttgttttcattargcagatgtatgggatagtaccaataaaaatgaaaaacagattttgcttgtgatatgccaatatagaggtaataccctgtgaagattttgtcttgtaggttttatgggagaattgtagacaaacctggtgaccatgatcctgagactttggaagcaattgcagaaaatgcaaaaggcttggctggaatatcaggagaaaggatttgggtggaactgaaaaaaattcttgttggtaaccatgtaaatcatttgattcaccttatctatgatcttgatgtggctccttatataggtgagagcaagttataaagtgtttgaatttttggcagtgaaatatctggtttcaratttcataaggaaaaaatgtttgactcatttggttgaagaattcttggagaaatggagtattttaaaataagacaaagtttgggttatggggtaagttttgtcgtgagtagggaagagctcaaagacagcttgtggtgcttgtagagtagtctctagtcagacctaggtttgaaggaagctcagccccttatctagtctttgcaacttgggttagtttctaacccaaaaaagcggtttaaaagtaatgtagcctctatctaataggaaagctaaaaggattcagtgagttaatacatgtaaagctcttttagaagagtgacttgtacacagaaattgttcagtaaacgttgtaattcattttcacagagaatagtgggattatatggtttatcacacttcggtaagcttgggcatatttcaaatttcagtaacattactgaatggggggtggatcttgtatcagtgtaaagtcaggaatttgtgattagaaagagtatgccttgtgagtctgacaccactgtcaccactacccctggamctcttgatgtagstttaatggaaacaagaacattttagaggttttgaaggtgacaggggagagaataacaatatattagtggttcgcctttaagttggaacatcagactgaacctatataatgtatcctagtgacaaagcatttctggatactaaaayrgtggcaaggtttaggatatgagtggttttttatccccactaaaaacaggtgaaaaatgcttttgtccctacaggtttacctgctaatgcaagtttagaagaatttgacaaagtcagtaaaaatgttgatggtttttcaccaaagccagtgactcttttggcctcattattcaaagtacaagatgatgtcacaaaattggatttgaggttgaagatcgcraaagaggagaaaaaccttggcttatttatagttaaaaataggaaagatttaattaaagcaacagatagttcagacccattgaaaccctatcaagacttcattatagatgtaagtatatrctaggcttggtcagaaatatgaagtatcgtcacgaatttagaattaatttattaaaactaagatctacaaatctgtgaattttacttattttaaatgaaaaaatttatgttgagtatttaaattttaggataagattgtaagtgtatgttttcatgtgtgacgaaactaaatgtttgattttgacacgtagtctagggaacctgatgcaactactcgtgtatgtgaactactgaagtaccaaggagagcactgtctcctaaaggaaatgcagcagtggtccattcctccatttcctgtaagtggccatgacatcagaaaagtgggcatttcttcaggaaaagaaattggggctctattacaacagttgcgagaacagtggaaaaaaagtggttaccaaatggaaaaagatgaacttctgagttacataaagaagacctaaaactgatggctactaaaaagcagagcatttctggtaagactaaattttctcccctccctcttaatgaggttttagagactacaccagaataaaagacagtttaggggacctctgtagaacaacaagggtcttattttgtgaattatatatttcaagaactaaacagagatccacctttctggatctgatttatatcactgaaatgtacagttcttttggaatagtttcacctgagaaaacatagttggctattatctatcttaacctgttcaggcttttaaaaaaaactgtttttgcatagggtagtactaagatcttaaaaagtggtaactgtcttgaagaaaaaacgtttattgtttgtttgcaattgaaataacagggttaccttaacaatgactgtctatgatgtgtcagttcttatctgaattccaaaataaacctgtgcttaaaaaagaaataattgaccaagtaagtttgcataaaatgtgaatactaaatgtgtccccagttgctggcattcatatgtacaggatttgttctagcaagctatgcttcagtatgtggttgatatttttctgtcacaatgatttctttatgcatgcagagcctgggraagtcatgggattaacttgagggtcactattgagcctattaattaattaattattgttttaataaaacaaacattggtattggaagataaatatgtttatgtggtatctgacaatgtgtattaggtgtcatatacaatggtaatatgcctgtctttaaagtgttattttattaattaaaaggatatggctattattatatattctctaaagatttattctctaaagatttgagtcctaaatgctttcatcaggtaaataaaatgtataatacaaactgtttatttcagctgctataatttcagctgctatactgacatttcataatttatttcctttctgtgtagccagtcataacatctttgtactctatgagcaaatagtaattttggaccttgataaaacaattttgtagagtgtaatatttctaagaggaaatgtyacaggggctatgatgcaagaaagcctcagaaatgactgcatacaggtcagtaattagatgcattataaaataatactttgaaatacttacttaaaatatttaagtactgccaaaatacagatttagacccaacgtcatataatacatactatttctgtatagaaagtatgcagatttagctatcaggtctggttttgtcatgtgtaaaaccattttcagtagtagtatagtatatgtgtgtttttacagatcagaaaattttatttgctagtaaacggtatgggacatactgaaattttaacttttcagagggamaaggtaactcattgcaactggtttagagttcagcctacagagaggtactatgctactgacaggaacttcctggagtaagtaagttttagtgcagtgtaagaactataggaacaaaccagaccagtgaagtcacacaaacccaaaattattaaagtagtaaaagtagaccttagaaaaaataaggcaggggcatatcctgawtggaagtattcttgaattttcatttactctatttacayaaatatgcagtgtgacactcaactgatttcactccaccttcaaggcatgtattttggcctcatactattactacatttgagtaaacatttaacctgattagttttaaagtagcaaaggactaccaataaaacgaaagttatcatacaaatgtggaaggaaggacccactaaacccttgaatataagcaaagaggtaggtggcaaagcagcctttttagaactttaaaattatgagtagatattttacattatttgaacaaagaacatgtttagtttcacacttaaggtttacttacttacagattttcttcaatttacattgaacaaaataatacagtatcaagtttagyctgggtgaggggacatgttttggcatcttttccctakagtagtagttttggttcaarttaatttttgaaaaatagcttttgtatggaacagtataaatgggcttatagttcagatactgagcaaatacacaatactactttttactaacaggcacataaaggaaatgacaactattcgtgggctcaaaaaactgcatattttaactaattttcaaaatttacaaatcagtatctcagagaagttaaagaaaatggaaaggaacaaagcccttttagaataattaatatacattgccttgcttcttyccaaaaggaacatgtacttgtcaccctagcttttgttatttagagcactggtacagatacgctgtcccatacatcaggatcaaattattagtttcagtttcacattgtaggaatttaagattttttttttttttaacacaggaaataatctcatcatttccaaagatgtcttcatgtcccatcaatgacatgctaccagacatatcagattccacaggataatggcaccaagctacccaagtagatgtttctggtattctagactgccgttcatgcttgtttcctaaagtatacttaaaagtttcaaatacagtttcacttagaaactgcaaccctccaagtaatgttatgtttacttaggtattaatgttatgtttacttaggtatgtatcagaggcaataatttccaaagcagatcttagaatataaccaatttgttagataactttatctctatcacatctgtttacaagcaaagtattactttgtctggacttatttcatcttcagtgtctgggatcgtgggcaacagagcagatcgcgttaagccccaaaatttttgaggtgacatgtcttttttggtggccgtaaacttccatccaatatggcttgcacagatcttacactgggcaacagtccaggcatacctaagaaattaaggaaagatatcagctaaggaaacatttctgtactccaagcctatcatataaacctatcatgaagacagactttagaggcaaattctaaggattagagattctaagttgagatttgatccatacagttccctgaaacctaaaaacatttctaaaaacattttctaattttgtaatatgtatgacttttatgctcttaagccatgtttacatttttcttctactgcatagaaataaagagtaatcttatgaatttctttatagaaattgctggttgccaagaccacattctaacttgtactggcaccacattctaacttgtactggcttttcctttgttgtattgcagtcaagttagaaaacagcaattacctgcagaaataatgcacttctgtctgagttaaactggatgggccaggaaggacacgtctcaaaaaataaatatttaaaaactactattctaaaataagaacgattgtcagataatgcaaccagaaatacaaaccatggtattttgttcttaagataaaccatgtaattgcaactgtttccttatttttttccctaggtataccatgccacatttatttatagtaacaaatgtattctagttttagtcctcacatagggtgccaagtaagatagggcaatccaagagacatagtcctaaccccagagtagcatgtaatcccttcttagcatccctctttgaaaactgaagatagtacagctgagggaactgaacaggttcccaggatcatagagaatcattaagctgaagcaaacaaacaaacaaacaaaaggcaaactagaagaaaagcaggattcaatgggttctgcaccttcttagtctatcattgctttgtaaacattctccggttttacattactacagaatatggtccagatataaagttctactgggtcataagacagctgattttcagaattacatgactgacagaaaaaaacaattttggatttaactggatacagtaatctgaggacaactgcagttgtcaaccttttcttcctttcattcaatgataaaagatacaaaaagtgcaacagatgtttctagctatttgtggaatgaaggacatttaaataaatttttttttttttttaaatagacagattctcactctgtcacccaggctggactgcagtggcacaatcttggctcactgcaacactcttgccttccaggttcaagagattcttgtgcctcagcmtcccgagcagctgggagtacagacccctgcccccatacccggctaatttttgtagcaaattactcatttgtctgtctactttttattataaagattgtggcaactctgcttaggactctggatttttctgcccaattaaggtaaaaaaagaaaaaaaaaagcaaccaccaccataatattacccaggaaaccagctgtgttctgtagaaggccggcctatcagattcaagttgcaagccttatacacagtaagtgtctcatgcacatatccatgaggattcacataagctgccatcggcccacataaggataaactaaaacaaagaatcaacatggagaacacgtcaaaacgagaagtctaattttattaaatgcttagaattttattgaagttcaccaagaaatgaggtatgagctatacagtttttaatccttcagttttatataataccaggatcttagtatgaaaatggggtgggggtacagctggcagacaggcctgttttgtctaaatgtctaaatgttttctgtgatgacccaaaggaaatagtacttgtttttaaaaccctcctcaagacagacattgtaaagaatataaaactcaaatgcttctaaaggagtctgagagtgtaagtgcaatgacaaggtcctgtgtggtcattttggggcagttgattattttgcagaaagcagtttccttaccttcttgatttacaactgatggatttgtcataaaatgattttcaaacactgttatatcagagcatcagtatgtgttcagaagcatgtcctactttggccctatatggcaaaactgatgactgaaatgtaatttctgaagcatctatgttagggcctaattgaagacagtctaatatatagattgtcaacaagaattagggggaaaagaatttctcagttgttttactttaccatgctcattacctgtgaataatccctgacatgcattgttgctctgagtacccaatctggaagatggtcttagcaaaagtgagctaattccctatatttcatttgctaaatgtttgtaactttaaggtactggaggaaagtttatggaaaacagaaatacagtcttcattataattctgataaggcaagtatattaaaaacgtaataaagaccttacctgaatatttcatttttggttgttatttctgtttcttgacattgtttacagcaaagggaagtacactaaaagatttgagagaaaaattattggtaggaaaaactggcattcactttatcatgtaatcacatagatcatcaagaaacttacttataaagatattgctctctctgaatatcacattttccttccaagcattcaaaaacacttttaaagatggagcacgaaagtcactgaaactgagatctgccacatatttacataaaactaaatgaccttctctagagtaaaggaatagtgatatataaccttggatatttccatgcagaaatcaagttatttttcactaagttgataaatgtattcatatttgacaaacacaaaacaatgagtttgtttgtaagatcccaattgaaatctgaattgcatgactacattactggactctatacagagctccattggccccaacagagcatcctagttctccagcctgaataaaacatgggcatcaaaaacatattcactttactcactttattcataatgtctaattcacagcgaagtcgctggatagcactgccaattttaaggagctgaattctcaatacatcatcaataggaagacaagcagctactctgtaagaaaaatcttcaagacatggtttttcaagttttaaacttaggagtcagataagcatcagagaacttacaaatcggataatatccttttgaaataaacccttctctttaaggttacacattttatacaagtataaacaatacaaaaatataccagctgtcaaagatacacttttcagaagctctaaatttaattgcttttcttatactttttttggtaaaatccttttatgttaaacatgaactcaaatccatgttagaagttatttgccaagagactagaaaaataactaaactataccttataaacagataaagagagtatctataattaaggcaagtcctggaactagactcacttcttttaaaggcaccttgaagaacagggaaaggagtccttacacaggaagtgtttttggatgacagccacttcctgcaatttgaactttttatggaaaacttgtctaaaattggagtgctcacagaatatgaggattttattgcaattaattttaaaatactcattttttttcaactgctcaaaggaaattatgcttttcagaattaaaatgttttaatcagtcttaaaacctagaagatatgattggatcgcatccatgaaaaagctattttttatagcaagacatcccaggctccaggcaggaaactaacttttcatacctattggatttgaaggaagagaatcatcttttagattttcatcccattcacgtagctgtttcttgattctgtccattaaggtctccttgtttaaaataaaggtagccataatcaagttcatgggcttattaaaatttactattaagcttttcaactcttaaaactaacactggtagcaatttaatcactcagtcccatctcagtcccagtttaaatgcctccattttcgtatgcagcaatgatcaagctccagctcctttgcccagcactgtctgccttccagccttttctcactcactgtcttaacccagcggtatatgctcccaactcccttgcagattgttctgttctatgcccctgcttggaactggcctctcttctgccttctattaggccatttctgactcagtccatagggattatggcacctataaattgcactagcacttgctatctacataccttacttggcacctatttactacataattttcacaagcatatgcaaaacatgcaaaaactcatatattgtgtctttgtaattgctgaaaagctgctaaagagcggagatcaactgcagtttcctttagtgtcgtgcatgttgttgagttttcccaggactccagatttgtgggcagtgattcattaagggaaatggctagcatttattgaatgcccgctatgcacaccaggtacaatagctaccattatatccatttcataggtccttggagaagtaatttgctccaggcccacagagtaagtgacagaaatcagactctgaagtcagtctctgatctgaaatccagattctttaaaccatttcagcactgtcccttagttttgcaaaatgtggcaatgcctagtgttaaactttaaggagcaaaaaccctcctggatgcattaattaatagactaatgatcaagagacgtaagttaatatacttgtttagagaaaaaccaaaacagtaaaatatggatgctttaatgttctaaatgtaactatcacccaacccaacaaaatttcacatgcttaataaaactctaaagagtcttgtgatacctttttttttcccttttgagacagtcttgctctgttgtccaggctggagtacagtgacacaatctcagctcacggcagccttgacctcccaggctcaatcaatccttccacctcagcctctcaagcagctgggactacagccacatgccaccaaacctggctaatttttgtatttgtagagatggggtttcaccatgttgcccaggctggtcttgaatgcctggcttcaagcaatccccctgccttggcctcccaaagtgctgggattacaggtgtgagccaccactcttaacgatatcttaagttataaggcactagaaactggaaaaactaaacctttgttttttaatgacccttaattatgacatggcctaccatatataaagtaaatttaaggtaagttacttacagcatcatataaggaatacagccagcgaggccatgaagttagatttgcacaatgaaactttctctgaaaacaaaacaaaaaggcacttaaaaaaccccacagaataaagattctaatgctggaatgagcaacatctgaaaaatgattttggcctaggaaaacatctaattttaaaaagataaaaaattttgtagataatcccatgacgtgactatctatgaagtgtgaaatcatgcttcctatatccttcaaatatatattgtaactagaatcttcattcctatttaaaaaggtcaaacattaaaatttcaatgctgaagacaactttgggaagataaatgttgagagtaaacaccatacttctattatgaccatgttagttgcctttatactaattacttgtccagtatctgaagtgaaaacctcaagatataatccaaactgtttttgtgtaaaaactttaaatgagaatcagctgaatcactataagggcaaacattaagaagtgatagaatcccaagaaagataaaatgttcgtttacttgagacttcatgatgaagttcctcatttcataaaactcaaggagaggggaaaccgattatttatcacc

SEQ ID NO: 94418 - DNA, 106146 bp, Homo sapiens
  misc_feature (1)...(106146): n = A,T,C or G
tctacccatatttaaagctatatctcaaagcagttgagagaagaggacctatatgaatggttttatgtcatttttttaattaaaaaagaaaaattcatataatcgtgtttaaaacacaaatgaagtcagtatttgcctttgttaacccttatccatttgttgacatgtagactgtttacaaaaaaaaaacacatggttaaatgttaaattttaattaaggcccccaaaaattaaatataactttttaaaatgaaaggagtcaccttttacatgactcaggtgaaaaaacagtataaacattaatttactttgtgttcaaaagaaaattccaactgctgttggggaaggacacagaaaagaaaaataaccacccaagaaaaacaaaaacaagaaaaacaaatcttatacaatcttagtatatttatcaaactagtagctagaaagtgaatatgcacattactaagacaaaaaacaagtgtaattcagaactacttgattttttttagttaaatgcaataattattatgcttagttttataacctgctctccttgtgaattattccttcaaatgattacttaacgcagtagtaatagctagctgtaggatgtcctttaaatttttgtgcaaaaaaaaatttataccaggtatttggaaatatactttacaatattggaaaatgaagtatttttaatgtattacagcaattatgtttctaagcttaatgttaagcatgtagtcttagaataggacatgaaattaaattgtatgtagcttggaatatattgcttcagaaaactgaatgtgtatgtcggtcatattgcctttataaccatgctaatatctatgctttatacatactcaaacttgccttgccttaaaaamatacatactacatacttaaatcaggaattctagccatctcacagaataccaactaaaactaagtgcattgagatctgagattggtaaacccagattcatttaccacagctgtaattaagtttttagaaactattctctttttggggaaatccattgaagttaatttctgttatcttattagaagaaaatgatgttgatatgtgtttcagattttccatttgaaatcttataattaatttgatttatttactgtaagtaggaggtataaatgacactcttaaattggaacgaggggtgttttagtgtctgttttaggtcaaaattagtgattctatttttatcaaaagttttatcctgaagtttcaggaccactcttccttaataaacttgttaatggaaagcgagctttatgaacatttaaaaatgttgctgctgctttgttgcttaaaaagaaagttgccaagagagacttcttagggaaaatatttgggtttttttttccaaaaattgctgaaatattgttttgccatttttaaaaagtctcaggttattaccactctgccattaaatatttgtatgcctgcatttttaaaaattctgtgcatgtactttatggagtacattctatttttgttttcagataccctacaaccaattttttttagtaatcttttagaattgaaattatcataaatgatcgagaataatcatcacatagtttaagattgtatatgttgagtagtttaaaacaatctttgcattttacagtaagaatcaaagtcccttcagtgtgcctttgtcagctaatatgtgaccagcaatgacaaccttgggagtatttattaaatattatgctatgaatataggcaacacagaacagggtttgcagtatagcgtcttgatgctaaattctcatatacctctacacgagaaatatggaggagaaaaacaagcatttacatatattcttcgtcactttgaagatgcatgacctgaactcgactgcttgtgtttgtttacatatcaggcatacccaggcayctcctgcagccagaggttccattgctgtctttgctcagtcctcttttaaaatatgaattagtggacaggcacggtgcctcacacctgtaatcccagcactttgggaggtcgaggcaggtggatcacgaggtcaggagatcaagaccatcctggctaccactgaaaccccatctctactacaaaaaaattagccgggcgtggtggcgggcacctgcagtcccagctactcgggaggctgaggcaggagaatggtgggaacctgggaggcagagcttgcagtgagccaagatcacgccactgcactccagcctgggcaacagagcaagactctgtctcaaaaaaaataaataaataaattatgaatgagtattttctagaaattcaacttgctaagcctgtaatacttaagggtagtttatctagatacagtactttcttccctgataagtagtatcattggagcccttaggtataggagaagaggaagaagtttaaaaagtgtaagtgggccgggcgtggtggctcatgcctgtaatcccagcactttgggaggccgaggggggcggatcacgaggtcaggagatccagactatcctggctaacaaggtgaaaccccgtctctactaaaaatacaaaaaaaaacattagccaggcgtggtggcgggcgcttgtagtcccagctactcgggaggctgaggtaggagaatggcttgaacccaggaggcggagcttgcagtgagccgagattgcaccactgcactccagcctgggcgacagagcaagactccgtctcaaaaaaaaaaaaaaaagtgtaagtggattaaaagagaaacttggtctagttcataatatttttaatagggctttccctggctgctggaaaacttaggccagtaagcatctctttgtttaaagtcctacaagacaatttgaaataattcattgttcatgccaaaattctaagtactgtttttcttagcaagtgtaacataatcaggaacaatgggtacragtaaaacattctttggatgatattcaragccttattagcactgcayctgaataataggtcattttgcctcactcatttgccaaagtagccatttytaagttaaggaagtttttagataggctcatagccttgtatttcgttttagattgtaagctcaatggyagggatactatattggtaattatgttttcatatagcaaccaccmcagtatattcttggtgcttaataaatgtttataattgttaacaataacctgttgtatattgtttattttgaatggtatatatgtgaaatacatatgaaaattgaagtattcatgaatatataatagaaacaagtaaatgaataaaatgacctggttactatagataagccaaattttgaaccatctagaacaatggtgtagtcttccctctactcaatgtaaatgctgggttttttaattattattattattaagaaggagatacagtccaggcacagtggctcacacctgtaatcccagcactttgggaggccgaggccagtggatcacttgaggtcaggagtttgagaccagcctggccaacacagtgaaacctcatctctattaaaaatacaaaaattaatagggcgtggtggtgtgcacctgtagtcccagctacttgggaggctgaggcagtagaatcacttgaatccagggggcagaggttgcagtgcaatggtgtgctgggattacaggcaatgagccactgtgccctgccctcagctggagtgcaatggtgcaattaagttctttctttttcaactcaaaatttgtctgcatctttacccaaatatccagatctgatactctaggcttgggctaatatagtggggtggaggaggcttgggttaaggtttaaagttccaagggctgaaccggaataaatggtgtatttatcaagggaagagcaaggcaaaaccagcaagtccaaaccatggaggcctcaaccgaggtgaggggaaaagttagggagccttaggaaagctctgaggagggaccccaattagggggaccgtagttagggtatgaggtttgtgagatcaggactggaattgctgcaagagaccctatgattgggtggcagcagcacgttgtggagatgagcctgcttcctcagcctcttcctcttgtcagaaccctttgcctctccctacacacgcacacacacatgcatgcaccatgctacagaaacctttctcagtcttgccattctctcaaattatgcgttggtcttcccttcatcttcagattctttaaagagtaatcaaagttcccacttctagcatgatgaagtgaggaggtcaacaaatctttccaaaatgtaactgtatagctggacaaaccatttagcattctgcaattttaccaaaggcacggcacaaatggggatgtgtttaagaatgaaagctggccaggcgcggtggctcacgcctgtaaccccagcactttgggaggctgaagcagaaggaccacttgagctcaggagttcaaaaacagcctgggcaacttggtgagacccccgtctgtacaaaaaaaaaatcaaaaaaggcatggtggtgcacacttgtggtcccagctacatgggaggctaaggcgggagaatcatttgagcccaggagattgaggctgcagtgagctgtgatcacaccactgcactccaacctgggcaacagagtgagacagaccctgtccctaaagaaaaaaaagaagaattaaagtgagccttggataagaccagcctgtgtccgtggcatctttgcccaggctgctacccccatttaccccagctgttgataacacacacagcggcccccagcagggcagcctgtggagataagctcccctgccacctcgytgcaggggctggaggcaagagtgaggaaggttttgatttgcagcatggctagttaaggtggtgatatcagtgaccaggaggaagaaaggccactgactcctagcctgaggctctgggcctttggagacgagcaaacgacctgcagattagtcatggatgtaagagggagctccgggaggtcggagagccagagggagcttagtaaactcttcacactacccaaatggactgaaggctcatagctggcagagattagagcaagcccaagccatgtccatatgcctagggcacacagcctgtgtgtgtgccggtgccagtgttaggaagtaaaagccggaacacccttgcaaatggcccggggcgtgcctcctccccattgcacatagatccagcagcagatggtggaaaccatattggctttaactgatgtttgacaaactatgcaaacaagaagcgacctctaagaagccattctgaaaaattaaagcaaacaaatgccaacaataaaactgaacaatgacctgagtgagtgcacactgtggaggagacaggcttcctgcatggagtccagccaggagacagtacagaatgcatggagcagctattggaagacattgaaaactaaatagttgcaggcagctttcccaagaagaccagaacttgaagtaccaccaaaccagtggtgagataaccatgtttcccctacggcatcccgtgactaacctggcagtgggcaccagggtgcagatagaaagagctccagaagatgccctctatttctggctcaagtaacgggaaaagggtctcctaacattccgagggaatccagaagttcgttcctccccatttttcttttccctgttctctcatacctcagcccacaagcagtcccacagtggcactggcaccagccccaagaggagcccaggagccaagacgcaggagggaaccttctccaactgacagagctgtggtcccaagagggcagaaacaatccatgttgcttctcttccaattcagtcctcccactgcttggcttcagatgtagaaatgcatggtagagccagataccgaaagcctgttttctgcttggaagactaaaaagagaagcctcagcaaatgaaagcaacagggtaattgctgagagagagttaatcagtgaagcaaccccattaacctgtctataaaccccagggctcattcttgagctgctcctgcatagatctcgtcctgttcaacacaccaaagattgacagctgaactgagagaccatcacccacagacacaactggccactgggtggtgcacaagtcagacagaactgaatagtcctgtgaagactytggacactgaactgactttggaaccagactgcagaatggaggggtgggaacttgtggcttgaacctaatcaggtagattgcctggccaaaatgaaaatacctatcatctccataggatttaatttcattcaatgattttttttttagtaaatttgcaatgttttacagccwtccccaaaatctaattccaaaatatctctatcaccccaacragagactccattcasgttggcagtcacatgcactcccagatttcccctcyrcccagcccttggcaatcactagtctactttctgtgtctttgagtttgcctactctggatatttcatataaatgaaatgatatatgaggttttgtgattggcwcctttcatttagaataatgttttcaaggctgattcatgttgtagtatgcattggtacttcattattttttatgcaaaagtaatattctattgtatggctataccacatttttctttgagacagagatctcactatgtcgcccaggctggagtttagtggctcttcacaggcctgatcacagctcctgcatggatcaaggagcatcactgcagcttcaaactgcagcttcaaactctcyggctcaagcgaccctcctgcctcaacctccccagtagctgggactacaggcacgtgtgtctgtgccaagtaataccacattttaaaaatccatcttcagtagatggaaatttggatgtttccaccttttactaataaaaatagtactgctataaacattatgtataggttttcttttgtttttgttttttctttttttgtagagatgggggtctcgctgtgttgcacaggctggtctcaaatacctggactcaagtgatcctcccatcgaaaactcccaaagtgctgggattacaggcgtgagccaccatgcctggcctgtatacaagtttttgtgtagacatgtttacatccaattaatgaacacaggatgtctttccattgatttagctcctctttaatttctttcaacagtgttgtgtagtttccagtctacaagtcttacacttttggattaaatttattcataattattttattatttttgataatattataaatggaattgtttacttaattttacttgaattgttcattgctagtgtataagtaggcaactcattttttttaattgaccttgtatggtacaatctctttgaactcatttattatcactgatrgtttaggtctttttttttttgaggtttcattagggttttctgtatataagatcatgtcatctagaatagagatagttttatttattctattcctatttcaatactttttgtttgcatttcttgcctaattgccctggctagaacatccagtacagtgttgaataaaagtgaagaaagaaggcatccttgtaagtcactattttttttttttttttttttgacacgtagtctcgcactttggcccaggctggagtgcaatggcacgatcttggctcacggcaacttccgcctcccaggttcaagtaattctcctgcctcagcctcctgagtagctgggattacaggcgcccgccaccatgcctggcttactttttgtatttttattagagatggggtttcactattttggtcaggctggtctcgaactcctgacctcgtgatccccgcccaccttggcctcccaaagttctgggattacaaagcactttgtaagccactgtgcccagccgtaagtcagtttttataccccttctttcatccctgattttagtaattagagtctttcttttttcttggtcaatctcaaaaaacaaaagctttatgaatttaaaaacgtttttcaagccgggcacggtggctcactcctgtaatcccagcactttgagaggctgaggcaggctgatcacgaggtcaggagatcgagactatcctggctaacacgatgaaacaccatctgtactaaaaaaatacaaaaaaaaaaaaattagccgggtgtggtggcgggtgcctgtagtcccagctactcaggaggctgaggcaggagaatggcatgaaaccgggaggcggagcttgcactgagccaagatcgcgccactgcactccagcctgggcgacagagcgagactctgtctcaaaaaaaaaaattttttttcaaaacagcaacttttgcctttgttgattttctctactctttaaaaatgagttttaaaaaatttaatagtgattaaaaaaaagatttaccaacttaactttttttttttttttgagccagagtttcgctcttgttgctcaggctagagtgtactggtacgatctcgactcactgcaaccttcacctccagagttcaaatgattctcctgccacagcctcctgagtagctgggattacaggcatgcaccaccacgccccgctaattttgtatttttagtagagacggagtttctccatgttggtcaggctggtctccaactccccaccacaggtgaatgcccgcctcggcctcccaaagtgctaggattacaggcgtgagccaccgcacccagcccaacttaaccttttttttttttttttttttttgagatggagtctgtcacccaggctggagtgcggtggcgtgatctcggctcactgcaagcttgccttccgggttcacgccattctcatgcctcagcctcccgagtagctgggactacaggtgcccgccaccacgcccagctaattttttttttgtatttttttagtagagacggggtttcaygttgttagccaggatggtcttgatctcctgacctcatgatcggcccacctygacctcccaaagtgctgggattacaggcgtgagccaccgcacccggcccaacttaaccacttkcaagtgtgcaatgcagtagccttatgttgctgtgcaatgtatctccagaaagttttcatcttttatttctatttatttatttattattktgagacatgatcttgctgtcacctgggatggaatgcagtggtgcgattatgggtctctgcaacttcgaactcttgcgctcaatcaatcctcctgcctcagcctcccaagtagctggggactacaggtgcgtaccactgagctgggttaattttttttttcttttgtaaagagagagtcttgctttgttacctaagctgctcttaaactcctgatttcaagcaatcctcccacctcggcctcccaaagtgttgggattacaggcacaagccaccacttggcccaactttatcttttaaaacttgaacatctatacccatgaaacaacaattctccatttcctcctccccctagtttctgatggccaccatttgatttgctgtttctgtgaatttgactactttagatacctcatataagtggaagcatacagtatttgtatttttgcgactggcttattccacttagcatgatgtcctcaaggttcttccatgttatagcatgtaacagaatttctttcctttttaaggctgagtaatactccattatttgtatacaccacattttgtttttccactcatctgttgatggacatttaggctgcttctgcgtgttggctattgtgaataatactgctataaatacagatgtgcaaatacctcttacaggccctgttctccgccgggcgcggtggctcacgcctgtaatcccagcactttgggaggccgaggcaggcggatcacggggtcaggagattgagaccatcctggctaacacggtgaaaccccgtctctactaaaaatacaaaaaaattagccgggcagggtggcgggcgcctgtagtcccagctactccggaggctgaggcaggagaatggcgtgaacccgggaggcagaggttgcagtgagccgagatcgcgcttctgcttgccttaagcatggtttgctctttttttttcccaggctattgatttgaggtcttttttttaagtccactgatattcaaggtaattattgataggtaaggattaccactgtcatttaaaaaattgttttcctggctgggcgcagtggctcacgcctgtaatcccagcactttgggaggccgaggtgagcgaatcacctgaggtcgggagttccagaccagcctgaccaacatgaagaaaccctgtctctactaaaaatacaaaattagccaggcgtggtggcacatgcctataaccccagctattcaggaggctgaggtaggagaatcgcttgaacccggtgcggggaggttgtcgtgagccaagatcatgccattgcactccagcctgggcaacaagagtgaaactccatctcaaaaaaaaaaaaaaaaagttttccagatgggcacagtggctcatgcctgtaattccagcattttgggaggccgaggtgggcagatcacttcaggccaggagttcgagaccagcctggccaacatggtgaaatcctgtctctactaaaaatacaaaattagtcccatgaggtggtgcacacctgtggtcccagctacctgggaggctgaggcacaaggattgcttgaacctgggaggcagaggttgcagtgagccaagagtgtgccactgcactctaccagcctgggtgacagagtgagacggtgtctcaaaaaaaattgttttctagttgttttatagatcctttgttcctttcttcccctcttactgtcttcctttatgattcaatgactttctgtagtggtatgctttgattacttgctttttagaggtcattcttttttaaatatagtctttacaggtatacatttccttcttaatgttgctttagctgtatcccataagttttcgtatgttgtatcttcatttatccatctcaaatttctctaattttctaatttcacgtcgtgatttcttctcatttcctgtgtactttctaatttcccctgtgatttcttttttcttttctttttttttttctttgagtcggagtctcgctctgtcagccaggctggagcacagtggcacgatctcggctcactgcaagctccgcctcctgggttcacgccattctcctgcctcagcctcctgagtagctgggactacaggtgtctgccaccacgcctggctaattttttttttttttttttttttttgtatttttagtagagacggggtttcaccgttttagccaggatggtctcgatctcctgaccttgtgatccgcccgcctcagcctctctaagtgttgggattacaggcatgagccaccgcacccagtttcccttgtgatttcttttttgactcattggttatttagaagtgcgttgtttaatgtccaaatgtttgtaaatttctcaaatttctgttgttgatttctaatttcattccattctggtcagaacacatatgctttatgatttcaattcttttaaatttattgagggtttaggagtacaaaaggcttattgaaaaaagaatcattgaagtttttcttatgctctagcatatgggttatgctaaagagtgttccaagtgcacttaagaagaatgtgtattttgatattgttaggtggaattttctatagatgtctatttggtctagcttgtttaaaccattgttgaagtcttgtattttcttgatgatccctgtctagtggatctatccattattgtttttaaaaatacatttgatggttgaaagcaaaaattaggccaggcgtggtggctcacacctataatcccagcactttcggaggccaaggcgggcagatcacttgaggtcgggagtttgagaccagcctgaccaacatggagaaaccccgtctctactaaaaatacaaaaattaaccaggmgtagtggcgcatgcctgtaatcccagctacttgggaggctgaggcaggagaagcacttcaacctgggacaggaggttgcagtgacccgagattgcgccattgcactccagcctaggcaacaatagcaaaactctgtctcaaaaaaaaaaagaaagaaagaaagaaaagaaagcaaaagcaaaaattttaacattagtggagtttacaatgcatgtaaatgtaatagaaaacatctataatataaagagggaaaggtaaaaatacctatccagctgtaagatttctaccttccacttaagtggtaatatgttcattctgtgaaaaattaagtgcattgtaatccctagagtcaccatttaaaaaackattcaaagagatatattcaaaaccaatatatgaattaaaacagaacgctaaaaatcatttaaataaccaaaaaggaggcgaaaagtggtaagcagaaggataaaaaatggagcaaaaaaaaaagtaataagatgcggctgggcccagtggctcacacctgtaatcccaaaactttgggaagctgaggtgggtgaatcacttgaggccaggaatttgagatcagcctggccaacatggtgaaaccctgtctttactaaaaatagaaaartcagctgggcgtggtggtacacgcctgtaatcccgactacttgggaggctgaggtacaagaatcacttgaggctgggaggcggaggttgctgtgagctgagatggcgccactgcactccagcctgggtgacagggcaagactctgtctcaaaaaataaaataaaataagatggtagacatatatccaaacacataaataattacagtaaacataaatggactaaacctaaatcttaaaagacattgtcagaatggataaaagcagtgcccagccatatgctatttacaagaaacttgctttatttttttaaatttttttcatttttaaaaaaatgttttgcatttatttatttatgtattagagacaaggttttgctctgttgcccagactggagtgcaatggaatgatcatagctcactgcagcttccaactcctggactcaagcaatcctcctgcctcagcttcccctgtagctaagactacaggcatgtaccatcatatctgactagttttttgttttgttttgtttttttatagagacaggggctcaccaagttgcccaggctagtctcaaactcctggcctcaagcattcctcccacctcagccttccaaagcactggaattacaagcaatagccaccatacccagccaaaactttctttaaatattatatatgtaggttaaaaataaagaatagaggccgggcagagtggctcatgcctgtaatcccagcactttgggaggccgaggcgggtggatcgcttgaggtcaggagttctacaccagcctggctaacatggcgaaaccccatctctaccaaaaacacaaaaattactcaggtgtagtggtgttgcctgtagtcccaattactcagaaggcagaggcaggagaatcacttgaatctgagaggtggaggttgcagtgagctgagatcacgccactgtactccagcccaggtgacagaacaagactccatctccaaaaaaaaaaaagaaaggaaaagatataccatggaaatattaatcaaaagagttggtgtggctatgttgatatcatacacagcaaattccagagcaatgaaaaccattagggacaaaaaaggatcatacatcatgataaaatagttaattcaccaaggagacataacaatcctaaatatgtttgcgtcttaacaccacagcttcaaaattctcaaagcaaatagacaaacccaaaattatatctggagacttcaatactcctgtctcaatcattgatagaactattagaaaatcagcaaagaaggccgggcacagtggctcacgcctgtaatcccaacgttttggtaggccaaggtgggcagatcacacggtcaggagatcgagcccatcctggctaacacagtgaaactccatctctactaaaaatacaaaaaattagccgggcacggtggcgggcgcctgtagtcccagctacttgggaggctgatgcaggacaatggcgtgaacctgggagvttgcagtgagttgagatcgtgccactgcactccagcctgggcgacagagcaagactcagcctcaaaacaaacaaacaaacaaacaaacaaaaaaacaaaaaacagaaaaagaaaatcagcaaagaagaggagaattaaacagcaccactagccaactagatctaattgaactttgagaagactctacccataaacagcagactatgcattatttccaagtgcacatagaaccattcaccaagatagactatatcctgggtcataaaacaaaccttaacaaacttaaatgaagtgaaatcatgccaggtatgttctctgaccataacaaaagtagaccaggaatcaataagacaaacaataggagaatccctgaacacttataaattaaacaatagacttctaaattaatctatgtatcaaagagaatgtctgaagggaaattagaaaatatcaatattcctcatgaaattagatgcgaaaaccctaaaaaaaattgcaaattgaatcaagtagtttataaaatgttaatacatattcagtcattaaaagccacaaggtcgggcacagtagcttatgcctataatcccagcattttgggaggctgaggcaggcagatcacttgaggccaggagttagagaccagcctggccaatatggcgaaaccccatttctactgaaaatacaaaaattatctgggtgtggtagcacacacctgtagtcccagatactaaggaggctgaggcttgagaatcacttgaaaccagcaggcgaaggttgccgtgagccaagatcatgccactgcactccagcctgggcgccagagcaggaccctgtttcaaaaaacaaaacaaagcaacaaaaaaaatgctagtaggcaaattcataaagacaaaaagtagagttagggttaccaggggcttgtggagtggggagtggcgagtaattgtttattaggcacagagtttctatttgagatgatcaaaaagttttggaaatggatattgatgatggttacacaacatggtgaacaaacttaatgttaccgaattgtacacttaaaaacagttaaaatggtaagttttatgctatgtgtattttaccacaataaacaaacaaatgcatcacaaccaaatagggtttatcctgggactttcaaggatggtataacatatatatatatatatttttttttttttttttgagacaaagtctcattcttgcccccaggctggaacgcagtggcgcgatctcggctcactgcaacctccgcctcccaggttcaagcgattctcctgcctcagcttcctgagtagctgggattacaggtgcctgccaccatgcccagctaatttttgtatttttagtagagacagggtttcaccatgttggccaggctggtcttgaactcctgacctcaggtgatccacccgcctcagcgtcccaaagtgctgggattacagccatgagccaccgctcccggctggatggtataacattttaaaataaatcaatgtagtcatattaacagtgtaaagaagaaaaattacatgatcatatcaattgatgtagaaaaagcatctgacataattcaatgtccattcatgataaaatctgtcagcaaactaggaataggaaatttcctccatctgataaaggcatctataaatatctgtggctggccgggcacagctgataaaggcatctataaatatctgtggcgagccaggctctagcctgtaatcccagctgtttgggaagtcaagacaggaggatcgcttgagccagggagtttgagaccaacctggacaacataatgatacctcatctctactaaaaattaaaaaataaaaaacaaaatagccaggcatggtggttaatgacctacttaacagtgaaactctttccccttaagatcaaaaagacttttatcattaagtaggagagaatatcctctcacaccagtcttattcagtattgtactagaagtttgagatgttgaaataaggcaawaaataaataaataaataaacgtcatacagattggaaagaaagatctaaaactgtccctcttcgcagataacattactgtctgtgtgtaaaatctcaaagaatttacaattaatcccctagaacaggtaagtttagcaatgtcacaggatacaaggttgtatttctctataccagcaatgtacaatttaaagctgaaatctaaaaaaaaaatagcatctacattagctttataaaaacagaagttataacttaacaaaacatgtacaggatgtatacgctcaaaaccacaaaatactgatgcaactgaagaagatctaaataaatggagagacataccattcccgtgaactggaagacacagtaaagatgacaattctccccatattgatctatagatcaaacacatttccaaccaagttcttagcagattttttcatagatatagataattaaattagagaatgtaggtggaaaatcaaaggaactagaatgtgataacaattttgacaaagaagtataaacttgaaggaatcacactaccatctttaaaccttattataaagctatagtaggccaggcgcagtggctcacacctgtaatcccagaactttgggaggccaaggtgggtggatcatttgaggtcagaagtttgagaccagcctggccaacatggtgaaaccctgtctctaccaaaaaatacaaaaattagatgggcatggtggtgcccacctgtagtcccagctactcagtgggagaattgcttgaacctgggaggcagaggctgcagtgagcctagattgcaccactgcactttagcctgggcaacagaataagaccctgtctccaaaaaaaaagctattgtaatcaagaaagcgaggtatgtgaaaagagatagatacataaatcaatgaaaaaaaatagatagtccagatataaatccacactaatatgggcatttgatatttacaaaggtgctacagcaatctttgtaaattgattttacaaatcaatttacaaacatatgagaaaatatgtaaacatatgagtgtaaaacatatgagaaaatcttactgacctggggtcaggcaaagagttcttagacatgacaccaaaaggatgagttataatagaaaataatggctaagttgagctttattaaaattaaaggctgggtgcggtggctcatgcctatagtactagcactttgggaggccaaggagggcggatcatgaggtcaggagatcgagatcatcctagctaatacggtgaaaccccgtctctactaaaaatacaaaaaaattagtcaggcatggtggcacgcgcctgtagtcccagctactcgggaggctgaagcaagagaatcgcttgaacccgggaggtggaggttgcagtgagtcgcgattgcgccactgcactccaggctggtgacagagcaagaccctgtctcaaaaaaaaaaaaaaaaaaaaaaaaaaacaaaaaaacaaacagacagccagcccacaggctatagtttgttgacccttgtcctagaaaaattaaaactatgtccattgaaaaacctctatacaaacgtttacagaagctctattcataatcaccaaaaactggtaacaacccaaatgtcctacaaatggtaaatgtatgagtggtatatccatactgtggaatattattcagcaacgaaaacaaaaactatttctacaagcagcaactttggatgaatttccagggcattatgctgagtgaaagaagcctgtatcaaaaggttacataacatataattccatttatatggtatatagtgtgtaatcagtggtaagggggtgagtggaagatataactataaagtaataacatgaatgagtttttagaatgttggaattgctatgtatccttaccgtggtagtggttacatgaatctggacataggtgtcttaaaatttgtagaactggctgggcaggtggttcacacatgtaatcccagaattttgggaggccgaagtgggtggatcacctgaggtcaggagtttgagaccagcctggccaacatggcgaaactctgtctctattaaaaatacaaaagttagctgggcatggtggtgcatgcctgctgacccagttactcaggaggctgaggcaggagaatcgcttgaacccaggaggtggaggttgcagtgagctgagattgaaccactgcactccagcctgggcgacacagcgagactccatctcaaaaaaaaaaaaaaaaaattgtagaactatacactccctggctgggtgtggtggctcacacctgtaatcccaggactttgggaagccaaggcaggtggatcacaaggtcaagagatcgagaccatcctggccaacatggtgaaacccggtctttactaaaaatacaaaaattagctgggcgtggtggtgcgtgcctgtaatctcagctactcaggaggctgaggcaggagaatcgcttgaacccgggaggtggaggttgcagtgagctgggattatgccactgcactccagcctggcaacagagtgagactccgtcycaaaaaaaaagaagaaaaaaaaataaaaagaactatacaccccccaaatgggcaacttttctatatgattatatactgaaaataactgtatcaattatatattttttaaaaagtaatcaccactttgtgcacctgtttccttaccacctagttcctccttttccatgggcaggtgggctttggtctgtaccacttttttcaaaagtgagcttttagaggagaaggcagagcagatgtctraatagaaccctccagcaagcatcatcccaaccctctgccctgcaggaacaccaaatggaacaactatctacataaaaaggcacctttataagacacaaagatcagatgagtgatcacagtacctggtttttaacattatatcaaggaaagaggcactgaagagggaaggaaagacagtcttgaattgttgatgccacctgtcccccatatccccagtagtagcagcagcctcatgacaagagagaatctgtgtgatttggggagggagagtgcagtgattgtgagactttgccttggaactcagtgcctctctgtaacatcggaaagcaacacagggcagaattcatcaggtacctttggaggaagcatttggaccagccatagccagaagggaattatccatcctagttgtcagaacctgaactccagcaagccttgccaccatgggccaaagtgccctggtgtcctagggcactaaacttaaaaggcagtccaggccacaaggactacaatttcttatcaattttggtgctatgcttttttgggctcagagccagtgaattctgggtgcacataacctaatgagacaacagatggggtggctgagagcccagcaccccaggtagtacagctggggtagcatggctgtgggagagactcttttcttttctttctttttttttttgagacagggtcttggtctgtcacccaaactggaatgcagtgatacagtcatggctccgtgcagcctcgacctcccaggctcaagtgatcctctcacctcagcctcccaagtatctgggactacagacatgtcccacaatgcctggctaatttatttttctctgtagagacaggggtctcactatgctgcccaggctgctctcaaactcccgggctaaagcaatcctccagccttggtggcccaaagtgctgggattacaagtatgggccaccatggctggccaagacttttttcttctgtggggagagtaaagaggactctatcttgcaacttggataccagctcagccacagtaaaataggacaccaggcagagttctgaggcccccatttaggccctagctcccagatgacatttctggacacaccctgggctggaagggaacccactgccttgaagggaagaacccagtcctggcagaattcatcaactgctgactaaagagcacttgggccttgagtaaacatcagtggttgccaggctgtacccactgtgggccttgggtgagacgcagtgccatgctggcctcaggtgtgacccagtgcattcccagctgtggtggccatggggagagtctccttctgcttgatgaaaggagagggaagagtaaaggggactttgtcttgcagcttgggtaccagcttggccacactgagacagagcaccaggtgggctcctggggtccctgattctaggccttggctcctgtctggcatttttggacttgctctaggcgagagggagccctttgtcctcaaagaagagacccagcctggcagcaatcaccagaagctggctgaagagctcttggggcttgagtgaacactggcagtagccaagtagtactcactgtgggcctggggttgtggtggacacagggaaaggttccttctgcttgaggaaaggaaagagaggagtggaaggactttgtcttgtggcatgggtgccaggtcagcagcagtagactagagcaccagatagattcctaagttttccaaccccaggccctgactcccagatgggatgatatctctggacatacttggaaatagggggaatgaacttccctgagaggaagactgtaagcctggctggattcatgacctgctgacagtagagcctgtgcgctgtgagggaacaacaacggtaaccaggcagcggttgccataggccttgggtgagacccagtgttgtgctagctttgggtctgacccagtgcagtcccagtggtggtggccacaggggttcatatgtcacccctccccaaggtctagtcagctcagcatggacagagagagagactctatttgggggaaggcaaggaaagagaacaagagtctctgccaggtaatctagggaattctcccagatcttacccaagactactggggtagtacctcttcaagtctgcaggagtcacagcattattgggcttggggtgcaccctaatgcagatacagctgcagtcatcaaaatcttagatcacaacactcaattccctttgaatacttggaaagccttcccaagaaggacaggaacaaataagccagactgcaaaaactataataaattatctaaccaggccgggcatggtggctcatgcctgtaatcccaggattttgtgaggccaaggtgggtggattgcttgagctcaggagttcaagaccagcctgggaaacaagtgaaaccccatctctaccaaaaatgcaaaaattagctgggtgtggtggcacatgcctgtggtcctagctacttgggaggttcaggtgggaggattgctagagcccagcaagtcaagggtgcattgagctgcaatctcatcactgcacaccagcctgggtgacagagtgagaccctgtctcaaaaaaaaataattaaaaaataattaaaaaatgaatatctaaactttcaatgctcaaacactgacgatcatccacaaacattaagatcatccrggaaaatgtgaccttaccaaactaactaaataaggcaccagtggccaatcccagactgacagagatatgtgatctttcagacacagaattcaaaatggctgttcttgggaggctcagtgaaattctagataacacagaaaaggaattcagaatcctatcagatgaatttaacaaagagactgaaattattaaagagaatcaaacagaaattctggagctgaaaaatttaattgacatcctgaagaatgcatcagagtttctcaacagaattgatcaagtagaagaaagaattagtgagtttgaagacaagctatttgaaaatatacaatcagaagagacaaaagaaaaaagaaaaaaaagggtgaagcatgcctacaagatttagaaaatagtctcaaaagggcaaacctaaaagttacaggccttaaagaggagataaaaagagagatcatggtagaaagtgtactcaaaggggtaataacagagaattttcttttttttttttttttttgagatggagtttcactcttgttgcctaggctggagtgcaatagcacaatctctgctcaccgcaacctctgcctcctgggttcaagtgattctcctgcctcagcctcccaagtagctgggattacaggcatgcaccaccatgctgggctaattttatattttaggtagagatggggtttctccatgttggtcaggctggtctcaaactctcgacctcaggtgatctatctgcctcagcctcctaaagtgctgggattacaggtgtgagctaccatgcccagccaataacagagaactttcttcacttagagaaatatatcaatattcaagtacaagaaggttatagaacaccaagtagatttaacccaaataagactgcctcaatacatttaataattaaactcctaaaggtcaaggataaagaagaaatactaaaagtggcaagaaaaaagaaacaaataacatacaaaggagctccaatacgtctggcagcagacttctcagtggaaaccgtgcaggccaggagagagtgacatgacatatttaaagagctgaaaagcaacaacagcaacgactaccacaacaaacccgcttttatcctagaatagtatatccagtgaaaaaatccttcaaacatgaaggagaaataaagactgtctcaaacaaacagaagctgaggaacttcatcaacaatagacctgtcctacaagaaatgctaaagggagttcttcaatctgaaataaaaggacattaatgagcaataagaaatcatctgaaggttaaaaaaaacacctcattggtaatagtaagtacacacataaacatagaatatgattacgctgtaattgtggtgtgtaaactattcatacctcgagtagaaagactaaaagatgagggcagggcactggctcacacccgtaatcccagcactgtgggaggccgaggcgggtggatcacgaggtcaggagttcgagaccagcctggccaacatggtgaaaccctgtctctactaaaaatacaaaaattagctgggcgtggaggcacgcacctgtaatcccagttactcaggaggctgaggcaggataatcacttgaacccaggaggcggaggttgcagtgagccaagatcacgccattgcactccagcctgggcggcagggcaagactccatctcaaaaaaaaaaaaaaaaagactaaaagatgaacctatcaaaaaataacaacggtttttcaagatatagacaatataataagatataaaaagaaaaaacaaaatgttaaaaagtggggagatgaaggtaaagtgtagaatttttattagttttctctttgctgatttgtttttacagtgttatgttttcatcagtttaaaataataaattataagatgatatttgcaagccttgtggtaacttcaaataaaaaaacctaaaacagatacagaaaaaataaaaagcaagaaattaaaacataccaccagagaaaatcaccttcacaagaaggaaggaaggaaggaaggaaggaacgaacaaacgaaggaaggaaggaggaagggagggagggagggatggagggagggaggcagggaggggaggggaggggagggaggaaggaaggaaggtaggtaggtaggaaggactacaaaaccaccaggaaacaagtatcaaaattgaagtagttaagtgttcacttttcaataataatattgaatataaatggactaaactctccaatcaaaagacatagtggcagaatagattaaaaaaaaaaaagacccaacaacccgttgcctacaagaaacacatttcacctataaagatacacatagattgaaaataaagggattgggaaaggatattttatgcaaatggaagccaaaagagagccaaagtaactatactacatcataccaaatagatttcaagacaaaaactataaaaaatacaaagaagatcattatataatgaaaaagggtccattcatcaagagactataacaattacaaatatgtatgcatccaatactagagcacccagatatataaagcaaggagggaggggaggagaggagaggggaggggaggggaggggaggaaagggaagggaatggaagggaagctacaggccaatctcttgataaatgttgatgcaaaaatcctcaacaacatactagyaagcaaattcaccaatatgttaaaaaagatcatttatcatgaccaagtgggatttatcccagggatacaagaatggctcagtgtatgcaaagcaatcaatgtaatacatcatatcaacaaaataaaggacagaaatgatatgactacttcaatagatgctgaaaaaacatttgataatattcaacatcttggccaggcacagtgagtatcttatgcctgtaatcccagcacgctggggggccaaggtgagagaatcagttgaggccaacagtttgaaaccagtctggccaatatagcaagactccacctccactaaaaataaaaaattaatcaagtgtggtggcatgcccctgtagtcccagctactcaggaggctgagatgggaaaatcaatgtattttgtgattaaaaaaaaaactctcaaaaaactgcgtatagacagaacatacttcaacataataaaaaccatatataacagacccacagctagtatcatactcaatggagaaaaactgaaagcctttcctctaagacctggaacaagagaaggatacccactttcaccgctgttattcaacaagtactggaagtcctagctagagaaattagagaagagaaagaaatcagagaagagaaagaaacaaagggcattcaaatcggaaagaagtcaaattattcttgttcgcagatgatatgatcttatattttaaaaatctaatgacctgctcccccaaaaaaactattagaactgaaaaacaaattcagtaaaattggaggataaaaaacaaacatataaaaatcagtagcatttctatatgccaacagcaaaaaatctgaaaaatcaagaaaataatcctatttacaatagctgcaaataaaataaaatacctaggaattaacttaaccaaaaaggtgaaagacctctataatgaaaacaataaaatactgaygaaagaaattgaagaggacaccaataaatagaggaatattccatgttcatggattggaagaatcaatattttttaaatgtccatgctacccaaagcaatctacagattcaatgcaatccctattaaataccaatgacattcttcaaagaaatagaaaaaataatcctaaaatttatatgaagccacaaaagacccagaatagccaaagctatcatgagcaaaaagaacaaaactggaggaatcacattacctgacttcaaattatactacagagctatagtaattgaacagcatggtactggcataaaaacagatgcatagaccactagaacagaacagaaaacccagaaacaaatccacacagtagagtggacccgttataacaatggtgtcaagaatatacattggggaaaggacggtctcttcaataaatggtgctgggaaagctgaatatccatacgcaaaagaaagaaactagacttctctctaaccatatacaaaaatcaaatcaaaatggattaaacacttaaaattaagacctcaaactatgaaattactacaagaaaatattgggagaactcttcaggacattcgtctgggcaaagatttcctgagtaatacctcaaaagcacaggcaagcaaagcaaaaatggacaaatgggatcacattaagttaaaaagctcctgcaccccaagggaaaaaaatcaacaaagtgaagggacagcccacagaaggggagaaattatctgcaaactatctatctgacaagggattaataaccaaaacatagggcaggtgcagtagctcatgcctgtaatcccagcactttgggaggctgaggtgggtggatcacctgaggtcaggagtttgagaccagcctggccaccatggtgaaactccgtctctactaaaaatacaaaaattagctgggcatggtggtgcgtgcctgctgtcacccaagctgcagtgcagtggcgtgatctaagctcactgcaacctcttcctcccgggttcatgcgattttcctgcctcaccctcctgagtagctgagattacaggtgaacgccaccatgcccgactaatttttgtattttcagtagagacagggtttcaccatgttggtcagactggtcttgaactcctgacctcaggtgatccgcctgcctcagcctcccaaaatgctgggattacaggcatgagccaccgggcctggcctattcatgaatgttttaaatgccgcctagaatggtgaatcttttccagatttactttgatcagatccatcagaggaatccctatctatggcagctgtaacattactaaatgcatttwaaaaaaaattttaaggtggacaggaaggaggatttattggtgagtattaagagggggcaccacagtggaagccctcatgagtgcagggcctgccacttgcccagaggaccacgactagggatgtacttgaccccacagccatctgggatgagctgcttctcagccaccatgtcttcaaattcatccgcattgaacttgatgatgcccccacttctttgagatgtggatcttctgtccgccagggaactggaacttggccctatgcagggcttcaatcgcctgctccttgttctgcagcttggtgcggatggacatgataacttggcgaatgtgaaccctggaaacagtgcccgggggctttccaaaggcacttcgcatacgcggagcctgtcagccccagcacaggacaacatcttgttgatgaagatgacatggaaggggtggagctgcactcggatatgaaagccgtctttgccacaactttttaccatgtacttattggcacaaattcaagcagcctccagggcttcagaggagagccgcccatattcacctgtcaccatgtggccacagagtggaaactcatccacttttgccttcttctgccccaggtcaaagatgagaatgatggtatcagggacacctcggcagaactgaggctttgggtacggcttgttcttacaataccggtaacaacggacggggcggcggccmatggcgataccaggatcttcagyggcgcgcttaagagaaagagcaatgcatttcttaaaacttaaaccggaggtcaggagtttgagaccagcctgcccaacacggtgaaaccccatctccactaaaaaaaatacaaaacttagctgggcgtggtggcgagcgcctgtaatcccagctactcgggaggctgaggcaggagaatcgcttgaacctgggaggtggaggttgcagtgagccaaaattgcgccactgcactccagctggtcgacaagagcgaaactccatctcaaaaaaaaaaaaaaaaaaaaaacttaaaagtcaagattgcggccgggcgcggtggctcacgcctgtaatcccagcactttgggaggccgaggcgggtggatcatgaggtcaggagatcgagaccatcctggctaacaaggtgaaaccccgtctctactaaaaatacaaaaaattagccgggcgcggtggcgggcgcctgtagtcccagctactggggaggctgaggcaggagaatggcgtgaacccgggaagcggagcttgcagtgagcagagattgcgccactgcagtccgcagtccggcctgggcgacagagcgagactccgtctcaaaaaaaaaaaaaaaagaaaaaaaaaaaaaagtcaagattgctccatgatccatgggctgcagaatggacattgtgttagctggcaggaaaacattaatctacttgtacatctccatcagagctcttgagtgactaggtgcattgtcaatgagcagcagaatttgaaaggaatcatttttctggacaaatggcctagcttttggcttatcttggtttttgatatgccttcctcactaagcttaatcatttctagctttgatttaaagtgagagacatgcaactcttcctttcatgtgaacacttagaagcccttgtaggattattaaggtgcctaatttcagtattgttgtctctaggtgaacagggaactccgagaagagggagagagactgggaatggtgggtcagtgaagcagtcagatagaacagacacattcatcaattaagtttgctgtcttgtatgagcatggcttgcggtaccccaaaacaattacaataagtaacatcaaagatcactgatcacagatcaatataacagatattataataatgaaaaaatttgaaatattgtgagaattaccaaaatgtgatacagagacatgaagtgagtacatgctgttggaaaactggtgctgaggctggcgtggtggctcatgcctgttatcccagcactttgggaggctgaggcgggcagatcatttaaggtcaggagttcgagaccagcctggccaacatggtgaaaccccatttctactaaaaataaaaaaaaatttagctgggcgtggtggcacacacctgtaatcccagctactagggaggctaaggcaggagaatcatttgaacctgggagacggagtgttccccaaccaaactgagggtcrggctgctatttctcatggcccaataacaagatgcagatgaactcgggaggaagagagtttttatttctgcaaccagttacagcaagaaggcctggaaattatcgccagaccaactcaaaattacaaagttttccagagcttatctaccttctaagttatatgtctacgtgtaagtgtgcattcatctaaagacgtaagtgattaacttcttttaatatataactaaggtctgagtcctgaagacctccctctggagcctcagtaaatttacttaatctaattggtctagatgttggggtgatttttttttttttgagacggagtctcactctgtcccccaggctggrgttcaatggcgcaatctcagctcactgcaagctccccctcggtgccggggtgattacccttatcttgcctcccgctaagtcacagaggtttggggagttctttcagacccccaataaacttgtctgtggagacctggggagtttcttcagacccgcaataaaactggtttaatcctaaatgggtcctgttgagaactccttcgttatgggctgggtgcggtggctcatgcctgtaatccaaacactttgggaagctaaggtgggtggatcacgaggtcaagagatcgagaccagcctggccaacatggtgaaagcccatctctactaaaaatacaaaaattagccgggcgtggtcatgcatgcctgtaatcccagctactcaggaggctgaggcaggagaatcacttgaacctgggaggcagaggttgcagcgagccaagatcctgctgctacactctagcctgggtgacagaggaagactccatctcaaaaaaaaaaaaaaattccttcattattktgtcatgctttaaggcccaggacaggcctaggcaaaagttttgatggccttttgttacatcccagcctttgtataagggcactggcttttagtatttaacttcattcagtaattactgaaacagttgttatgaaagtctgcattagtgagacctggcctgccacaggaggttgcagtgagctgagatcttgccactgtactccagcctgggtggcagtgtgagactctgtctcaaaaaagaaaaatgatgcagaaagatttgtttgacacagggtgggcataaactttcaatttgtaaaaaacatagtatctgtgaagyacaataaaatgtagtgcgataaaatgaggtatgcttggacagcaaaacatcatgttgtacctagtaaatgtayacaatttttatttgtgaattatacctcaataaagctggacaaatgaactgtatttgcaacatggtagggaatatatgacattggacactaatgcaaatggaattttcagtgccttggtgaaaatgttataccactgaacaaaaaaaaaatgtagtgtaaaatgaagtaaaatgtgaaaatccctaataaatgcagaaatatgaactgcttatccaaaagagaaaagtcttttgagttcctcaagaagattctctctttggatgctgggcgcggtggatgccgggcacctgtatcygagcactttgggaggccgaggcagatggatcactggaggccaggagttcaagaccagcctgtccaacacggtgaaaccccgtctctactaaaaatacaacaataacccgggtgtgatggcatgtacctgtaatcccagctactcaggaggctgaggcacaagaattgcttgaacctgggaggcagaggttgcagtgagccgagattgtgccactgcagtccaacctggaccacagagtgaaactccgtctcaaaaaaaaaaaaaaaagaaagaaggaaaaagaaggttctctctttgggcactccttttcgatatattcaacataaatggattaatgataccatttttactaggtgagtatgtttgggcaagttgcttcagtgctcattctcttggtttccttttttttttttttttttggagacagggtctttctctgtcacctaagctggagtgcagtggagtgaacatagctcactgcagcctccaacacctagcctcaagagatcctcctgcttcagtctcccaaatagctgggactactggcaggcaccaccatgcctggctagtttttaatttctttttttttgtaagcacagggtgttgctatgttgcccaggcaggtcttgaactactgggctcaagtgatcctcccacctcagcctcccaaagttttggattacaggcatgagccatggtgcctggctgtcttttgctttccttatctgtaaaaactgaggataataacagtacccttacaaagttggtggaagaatgatattaatacaaatgaagtgctaacagaaagagctttggaacacagcaagtacttgttagctatggctattgttatcaacacacttttcaaggcaaacttgtggtttcacctatcacctgagatatatgacttttaagtccatcagatcttctcttttggtttttatttttaaattaattaaatattattattattattattttgagacagagtctgctctgttgcccaggctagagtgcactggcacgatctcagctcactgcaacctccacctcccaggttcaagcaattcwggtgcctcagccatccaaagaagctgggattacaggcatgcaccaccatacccagttaatttttgcatttttagtagagatagggtttcaacacgttggccaggctggccttgaactcctggcctcaagcaatcagcccatctgggcctcccagtgtgctgggattacaggcgtgagccatcgtgcctggccctcttttcgttttagagataggaatctcattctcttccacaggctggagtgcaaaggcatgaacataactcattgcagtctccaatcctgggctaaagggatgttyccccctctgcctttggagtagctgggcctcagaactgtgccrcaactactgrcttccatcaagatctctgtcctaccatttcatcttcctactaggctatccccacatggatakataaatggtacctcaagtgaaagaaatcaactacctaaaataggattttccactccaaactagattttctttacatgtcatttctgttaatgtgggycacacacactggtaagctcagaatcatctttttcttttcttttattcacatccaatatkgttgaaataaaacaaaatgctgtttttccttttttagaaaggcaatacttgttcattatatcaaaatttagaaaatatggaaaaacaaaaaggataaaaaattatccacaaccaaaatagcccaaatttccagttaaaaatrtcaacgcatttgatatttgtccacataattcagactgtaatgtttacacaaatgtgagcttttaaaatctaaaaggytctcactattaaaaatgttttgttaaattttgttttaaaagtaagattttaatatccaaattcccaaaatagacatttttgaagatttggaaaatacagacggctsaaaatctttacattattactgttaaattttggtatgttctgttattctgctagtgaaatatatatagatttgggggggctattccttttcctttttttttttttttttgagacaagkgtctcactctggtgcccaggatggaatgcagtggcgctatcacagttcattgtaacctggaactcctggactcgagggatcctcccgcctcgacctcccaaagtgctggggctaccagcttaagccactgtgccaggcgaatggctattcctatatacacagttgacccttgaataacatgggtttgaactgcctgggcccgcttataagccgacagaaaatacagtattggaggggcctgcatatagagaggtctgacttttcctctaagtgttccacccgcaggactgactgcgggatttgagaatgcgcggacttcttcttcttctttttttttttaggaagtcttactctcgcccaggcttgagtgcagtggcgcgatctcagctcactgtaaccctcgcctctcagtttcaagcgattctcgtgcctcagcctcccgagtagctgggattataggggcccacctccacgcccaggtaattttttgtatttttagtagagatgggctttcgccatgttggccaggctggtttcgaactcctgacctcaggtgatccgcccgcctcggcctcccaaagtgctgggattacaggcgtgaaccacagcgcccggcggaatgcgtggattttggcataagacggtggttctggaaccaatcccccgccgagatgactgtttaaaaaattgtaattgtccaaaacttaatatttgtggtctttttcattatgcagttctaaatctccctttttttttttttttaaattcagacggagtctccctctgtcgcccagacggcgcaatctcggctcactgcaacctccgcctcccgggttcaagcgattctcctgccttagcctccggagtagctgggactacaggcgtccgacaccacggccggctaattttttgtatttttggtagagatggggtttccctgtgctagccaggatggtctcgatttcctgacctcatgatccgcccgccgtggcctctcaaagtgctgggattacaggcgtgagccaccacgcctggccctcatttaataagatatgaatttaaaaatgtatgctttagtattcacacatgtccgatgcaacgtatttaaccagtcatctccagaaactttgttccaatttacacgttcaccaaattggcctgagtgctttttttcttccaatgcattgcgcacttataatttagaacaagtgaccaaaacgcttaagagcccatcacgcaaattgttatctgctggaaatctacgccctaggctgtggacactggcggccgaaatctgatcccggcttgccaagacaccctcagagcacgcggcgctgccaagagcctggccgagtgcagctcgagcgccgacgtcgccaacgtggcgcacactgctgacgcagtacgcaagttcgtcacagtggtcctccgccggctgcgccgcaagttcgtcacagtggtcctccgccggctacggcgctgcgtcactggtttgcaggcgctttcctcttggaagtggcgactgctgcgggcctgagcgctggtctcacgcgcctcgggagccaggttggcggcgcgatgaggcgcagcaaggctgacgtggagcggtacatcgcctcggtgcagggctccaccccgtcgcctcgacaggtgagtgggtctcgaagagaccgacggcctcgacctggccgggcggcggcctcgcgctgctcaggcgtcatggctcccgacgggcgctgctccctggcgcgctctgttgaggcgccggccggctggcgcagtcctgtgggcggcgtggcgcttgcaagcgcatgaagagtcctggggggacagcggtgggcgggagacctttggcgccggcgcttcctctttctcccggcttgttcccgacgcttgttcccgacggtgctcgctcctgggsccgycctggcccgggctttctggccgatcgcgcaccccgtrgtacccgcgcggcctagttctcgggggcttgggcacccgggtgctgtatcggcgggtttcttcccatctcctggacatwtactttatatgcygcggcggaggtcgtacctccttggcctggaggaacccagtggggactgacgcagctccgggtgagctttggcggctgcgtcgagtgacaaggtaggcatctcagcgcggacatttgcaatggccsgacggcrcaaatgacackgaaagtccccttgttttgagtatgaggtgtttgtcgctgtccctttgtaagggtccagctccactccrctcctcatactcacctccctcgcccccctccccgcccggaacactttggtagctgcctttgcttaaaaaaaaaaaattctaaagttcttacaaatcgttagtatggcttgcaatttttaaccttttccacaaatgttttaagggtatttttcctctttacatgtaaataatgtgatctattttggattcaataagactttagtaattggatctaaagagtgacggaagaagctattaaaggtggatgtgcgcagaatcttgagtcagtttgctttggcttgaataatcacagcactgtcgtttataagctgggtatttggggccagttacacttttcatccatagatggagttgtaacattaatagaatttgataggatgatccattttaaacatttagggtattgcttgacacatagcactaaatgttagctacaagtcactttttattgttgatgttaaaaggatattggcggggcgcagtggctcacgcctgtaatcccaccactttgggaggccgaggagggcggattgcctgaggtcaggagttcgtgaccagcctggctaacatgttgatacctcgtctctactaaaaatacaaaaaaagttagccgggcgtggtggcgcatgcctgtagtcccagctacccgggagsctgaggcaggagagtcgcttgaacccgggaggcggaggttccagtgagccgagatcgcrctactgcactccagcctgggcgacagagggagactccaaaaaaacaaaaacaaaaacaaaaaaaacccggaaactcacggatgaccatgattataatagtagcataattgtgtctcttatcgtaactaagcataggttatcttattttgcgcttccagcagccctgtggatattgagacctgtagagatttaagatacttgttcwgggtcaaatagatagtgcagcagaattttggcagtgggtctgatttagtttctcttgggaacagtggagtaagttacagtctattcctccagaggaggaggatagatatctacttgtacattgtaatttcaaactgctagcatagtataaatatgaatgtgatgatagagtctaaaacagaccttaattgagggttcctgtaactcctgaaattaaagactttaatttttgtgttattttattttttttgaggtggggtctcactctgtcacccagctggatgcagtggcgctatctcgactcactgcaccttccgcctccccagctcaagcgatgctcccacctcagtctcccgagtagttgggaccacaggtgtacccaccacacccgctgttttgttttgttttgtatttttggtagagactgggtttcaccatgttgcccaggctgttcttgaactcctgggctcaagtgatttccccgcctccacttcccaaagtgttgggattataggygtgagccactgcaccggccattattttatttttgagacaaggtctctttctgtctcccaggctggagtgctgtggcgggatcgtggctcactgcagcgttgacgtcctgggctcaatccatcctcccaccttagcctcctgggtagctgagactacaggcatgtgccaccatgcccggcttttttctttaatgtagagacggggtcttatcatgttacccaggctggtctccaactcctgggctcaagtgatcctcccgccttggccccaagtgctgagattacaggtgtgagccactctgctcagcctgatttttttttttttaaacaagcttaaaaaaaaaaaaaagcaagcttagagcctttctgagattcttagtggggaccttggcttccaaaagattaaaaaccactggtctagacagaagtyagaatgttctttcaactacataacttctccattaaataaagtggagtggtggcagaattttgasgattggttattatgacacctctcttacacttagagtcttttttttcccccaaattkaaagtcatttacattagaacctggggatttcagcggaatatggattaactagtgagtaactttggaacatgtgaagctattctgtraagttaggtttgagtgaaatgacaaaacagggtgctttggatagaaggtaaagaatggagggagaagaggcagtggctgtgaagaatatgaagaggttagtattctcccccagtttggcagaggctggccatctgtgaactgcccatgctttctagaatgtcggagttttggwgtgtgatgatgcgtctgtatatcatatctttctagtcttycattgygctttcatttgttagtctyctcttgttttgccatttttctactccctcacatgtgcttttgcccttaaaaatattcttcgtctgtaatcygagcaytttgggaggccgagagaccagcctgaccaatatggtgaaaatccgtctctattaaaaatacaaaaatgagccgggcgtggtggcagcgcctgtagtcccacctactcggtaggctgagacaggagaattgcttgaaccctggaggcagaggttgtggtgagcagagattgcrccactgcaytccagcctgtgtgacagagcgagactctgtctccaaaaaagaaaaaaagaaaaaaaaatataattctttctctagtttttctttttccagatggcttctgtttagtttttctatgttctgtcaagtygrtttcttattctgcagctgattcctacttctcaaagtctacttgacagctcttatttttatttatttgttttttagaatagggtcttgctgtgttgcccaggctgccatcaaatttttgggcgtaaatgatccacctacctctgtttcctgagtacttaggactacaggcaggcacctttgacagctgttagttgttttttctgccctttacagctatacttcatacttctgagtaacacacatatatacttttgttatttttaattycctttctcccattttagacattttcttttcttttttttttttttgagayggagwctcgctctatcgtccaggctggagtgcagtggcgcgatctcggctcactgcaaactctgcctcccgggttcacaccattctcctgccccagcctgtagctgggactacaggcacccgccaccacacccggctaattttttagtrtttttagtagagacggggtttcaccgtgttagccaggatagtctcgatctcctgacctcatgatccgcccgcctcagcctcccaaagtgccggggttacaggcgtgagccaccgcgccsggccccattttagacattctgtactggytattatgctcctccaaaactgtcctcagacactttggtttgcccctcattctttcagtactgttattgcagtttttgtttaaatgaatatttaacatttatataaatataaggtaaatatttttgcatttgaattgcccttgttgtgcggttttgtttttcctggactgaataattgctttattttttggtttgcttgtatgttgtgttactacttgcttacttaaactcagcaatttacaccctcaaatgtggtcaaactggtcacataatcccatcaattgcagcttaaaacattgattgattgattgattgattgattgtctgtctacctggaatacccttactaactgacttctccaaccaggattggtttttcttcctctttgctacacagctgtgctcttgggacttccctttatcatcagtttgagaattcctttcatcttttttctgagttagaccctttgtttcttgtatctcatgtcstcttcatttactttctttgttttggtgtagcatagtctcacttgctttgaggaaaagtagatgagaggtttttttgtttgtttgtttttgttttgggacagagtcttgctctgttgcccaggctggagtgcagtggcatggtctcagctcactgcaacttccgcctcccgggttcaagcgattctcctgcctcagcctcctgagtagtgggattacaggtgtgtgccaccatgcccggctaattttttctatttttagtagagatgggatttcaccatgttggtcaggctggtcttgaaactaatggtatgtctttaaaatgtctttacttaatttagttgatcatttggttatcgaattctgagtttgaaataatttttttytcgcaattttgaaagcattgctycattttctagaagttctgttgttaggagtcysatgagattcttgttcttggtaacttaaaggttttctggaagtgtcctttcaattgggaaactcatttctttcagttctgtagcatttcttgtattatttctttraccatttcttaccctttttttaatgaygtttacctgaaagctggagtttctctaatttttctcttattctcctcttttgtttgttctgcctyttgagagatttccttacccttatgttccaggggaagaagattggggaactcatggttcagtatctagacttttcctcattgtcctgtataatcrcggccttcacccttgttgggactccacagatttgkagctgatcagatgggtttgttgagaacagctsakcagatgsktttttggaggattttagggggagggagattcatttgaytgtgcaagatgggygacagagygagactccrtytgaattwaaaaaaaaatttagaactgcatartgaaaaagtaggccacaaatrttaagttttggacaattacaattacatctctatcttactgtgcaagataghgatgatgtggcatctcttrgggtcttactgttcctgttttcagccctgcatcagttcttgatatttgrcagcttaagtgaattcaggtatttgcttatagtgacatctgctgtcatgtaaagaagtactgcttgcatcagatattgtcctgtttacataacatgggctgtgctccttcctagctgtrtatctttaaacaaggcatttacctgcttgagcttcagttcccttgtaaagtgagcaggttagaggcaaaagatcatatagaagaataatttgtaaagttgtttaattatcttaagattgtctactttaataacatagttggaagcaaagaaggtaatggaattatytttctattatgttttggcattgtaccttgaatctatttcttcattttgaaaagggggaactggctgggctcaatggctgacgcctgtaatcccagcactttgggaggtggaggaagtcagatcacaaggtcaagagatcgagaccatcttggccaacatggtgaaaccccatctctactaaaaatacaaaaattagctgggcatggtggcgtgcgcctgtagtcccagcttgtacccgggaggcagaggttgcagtgagctgagatcgagccactgcactgcagcctggcgacagagcaagactccatctcaaaaaaaaaaaggaaggggggaacaagccttgttcctwtaygtgctgtcctgactgctgtgtattatttttgttaagattgctgtagttctttttttttttgagacggaggcttgctctgtcgccagtgctgggattgcaggtgttagcctggcattgagcaasgttttgtaatttaagcatacaagtctctcacctccttgtttacatttattcccaggcatttttttcwtttagatgcgattgtaaatggaattgctttcttaatttcmttttctgattgttcgttgctggtacagtagtcccttcttatccacagtattgccttacgtggttttacttagctgtgtcacccgtggtccaaaaatattgaatggaagattatataaataaacatttcatgagttttaaattgcaaacrgktctgaataacatggtaaaaatctcacrgcctcctgctccgtcctacctaggacacaagtcatccctttgtccgacatattcatgctgtatgtgctcgccacccgctagttacatactagtcatctcagttatcagatcagttgttggagtattgcagtgcttgtgttcaagtaacctttattttatttaaaatggcaccaaagagcaagagtagcgatgctggcagttcacatatgcagagagaagccatatagtgcttcctttaagtgaagaggtgagtttttttgtttttttttttttttggcttaaacaacagaaatttattttctcatggttctggaggctagaagcggcagatcagggtgctgctgctttggttcctgatgagggctttcttcctggcttataggttggctggcatcttgtcctcacatggcagagggagagtactgtagtctcaccttgctttttattattattatttttttaatttatttttttattgataattcttgggtgtttctcacagagggggatttggcagggtcatgggacaatagtggagggaaggtcagcagataaacaagtgaacaaaggtctctggttttcctaggcagaggaccctgcagccttccgcagtgtttgtgtccctgattacttgagattagggagtggtgatgactcttaacgagcatgctgccttcaagcatctgtttaacaaagcacatcttgcaccgcccttaatccatttaaccctgggtggacacagcacatgtttcagagagcacagggttgggggtaaggtcacagatcaacaagatcccaaggcagaagaatttttcttagtgcagaacaaaatgaaaagtctcccatgtctacttctttctacacagacacggcaaccatccgatttctcaatcttttccccacctttcccgcctttctattccacaaaaccgccattgtcatcatggcccgttctcaatgagctgttgagtacacctcccagacggggtggtggccgggcagaggggctcctcacttcccagtaggggcggccgggcagaggcgcccctcagaagaggtgagtttttgacttaggaaagaaaaaagatcatatactggagttgstaagatctatggtaagaacaaatcttttgtccatgaaattgtgaagaaggaaaaagaaatttgtgctagttttgttgtgacaccccaaactgcaaaagttacagccgtagtgtgtgataagtgcttagttgagatggacaagacattaaatttgtgggtggaggacacaaacaggaarcatgtttcgattgacrgcaacctggtttgatactattcatcgttttggacattcactggggtcttggaatttcaaaaataagatgtttgagtagctgtatactctttatcacatggatggaacatactctggttgtatcagcatttttttttttttttttttgagatggaatcattctgttgcccacgytggagtgcagtggtgcgatcttggcccactgcagcctctgcctcccggattcaagcgattctttgcctcagcctcccaagcagyggggattacaggggtgtgccaccatgcccagctaatttttgtatttttagtaraaaggaggtttctgcatgttggccaggctggtctcgaactcttggcttcaggtgatccgcccgcctcggtctccraaagtgctgggattacaggtgtgagccaccgcacccagcctggtgtgcatcagcattttggactttggagtttaygtaaccaaggakccaggctgtggacctcgtttattacttgaagaattcaatatttatttctgcctttttgactccttgactgtaaaatactgatctgatctgtagagagaacagtacatggaccmgggaatcctcagtgccttaatagatcstaagtacttabttattctttcccatagaggcttacacatggtaggaraagagatttctggaatacctttcctccccaaagaaagctggtttcttttgtttgttaagtgagagagtggtaccacagggtttccragatttccaaggctgatgaaaattcttctgttgtctgcttgtcttrctttcwtgaatttattttttgtatgttatgtatttattatttagagasaggatctccctgtgtcacccasgctggagtgcagtgtyacagtcataactcacggcagtgtcaacctcctgggctcaagtgattctccttccttggcctcctgagtagctaggaacacaggcatgctccactatgcctggctatttttttcyccctggagacaggatcttgttgtgttgcacaggctggtttcaaactcttggcctcaaagctagcctcccaccttggtctctgaaagtgctagaattaaagktgtgaccaactgcacccagcttatttatgatgatgatgatgatgatgatgatgatgatgatgatgatgatgatgtttgggagatggagtctcgctctgtcgcccaggctggagtgcaatggcacgatctcagctsactgcaacctctggctcactgcaacctccacctcctgggttcaactgattctcrtgccttagcctcccgagtagctggggttacaggcacccaccatcatgcctggctaatttttgtatttttgtcaagacggggtttcaccatgttagccaggctggtctcaaactcctgacctcaggtgatccgcccacttcggcctcccaaagtgctgggattacaggcatgagccgctgcacccagctctattttttgttttgtgataggaaattataaaacatggaattatgcatttgtcagcctttaaaaaaayytttaagtgaatgaaartggcgtatttgaacatcaacttaggacagatttttactacttttgaaaaaatgttggaraatatttctgtatgaaaygtaaaacaacttttaattttttttagaagtcaatgaaaggattctattttgcaaagctgtattatgaagctaaagaatatgatcttgctaaaaagtaagtacaaacygtaacatgtattttttttttaaaatcaatgccttttctcattttcttmtttgaaataggtaaaaatatrtycttagtagttcttcctaagtgtattctggaataagggatttatcactcagactgatgctaaggaccagcctagattccattgagattgaaacygyaattagtgttttctgcatgctgctgctttatascaagggcaagaaattgtttggcttcaaatactttttctaaaaattgtcttctgttgragtaaaagaggaccatgcctatatcttmatttgtttttggttagatatstgataccttaatcagatggaaaatagcaatgaataaaaaaytaaacygtaattgtaaggcaggagaatagcttgtataaaagatstttaaytgacacaatatgtgatgctstaaggctctatcctagggatragaagcttggtgattctgatttcctgrctkggagtggattaaagcaggaaattaagagggagkcaggstttttttttttttttttagkcagtatctgtctctcttgctcmggctggagtgcagcagctggctccatctttgctcactgtaacctctgccttctgggctcaagmgatcttcccacctcagcgccccaagtagctggggatacagatgmgcaccaccacacctggmtaaggtttgcattttttggtagagacaggtgtcactatgttgcccaggctagtcttgaacttytgagcrcagcagtctgcctgcctcggcctcccrtastgttgrgactacaggtgtgtgttactgctcccagctgggaggcaggcttttaaaggcatccaaaggaagatggaaatgctggtaagaaaggaaaatggtggtacataaattatgtaactagcagcactgtgactgttaactcttgtacctttttacygtgagactttaatcccttagtttrggtctggcctmatttctctgatsgtaatactgtcaaggaacctagaggatatttacttattttagttgttacttgatttgagaaatggaaatttcctgtatttggtactgtaatkagtaatttttcttctgttcgattttagctggatatagtactgttagaaattactttcttgcttaaagggtaartgtatttccctttgktgtttgggaaattgttgctgtttagtattttgcattmtgataactttaaaaatgtttaytataatcacttctaatttattygcaaaactgttagtgctttattaaaatgtgatcaggaagaaaaagcaatytatatgttcatttcttatgtgtggwtaacactggagaaaaatttggtaaatgtgacatttaatggtaaaatgagtatgtggtcaactctatgtaygtgtttttaagtattatctatttctatgagtacttctgagttatctgtatgaatagyggtagttttgagtaacaatataaacragtttagtggttgctttggtttaagatgtattcttcggttagcatttaaaagtacagttctaagtttaatttacttttgtattacttttaaaaaacagatacatatgtacttacattaatgtgcaagagagggatcccaaagctcacagatttctgggtcttctttatgaattggaagaaaacacagacaaagccgttgaatgttacagggtaagttacargattcaaatatagcctttgcrtagccaaacacatgatgcccagagaaatttatataagtaagtcaaatatattttatraatatcataaaacaggcattggtatcatagtacagttaygtgayacagcttggaacagatttagaattgtttaacacctataaattgtaagtctaacacggtcagaaatggtgttcttttgtgttttttryattcaaatgacacaaatataatytttatttgrttcatttccagaraattccaagacacttttattttaacacctttgaagtaayatgttttctcyagaagtagaattttttaagrgttggagtgataattttttaacctttatatataagtatatatactcctacatacatacatacaatttatttactaatctttaatttcttttctgatattagcgttcagtggaattaaacccaacacaaaaagatctkgtgttgaagattgcagaattgctttgtaaaaatgatgttactgatggaagagcaaaatactggctsgaaagagcagccaaacttttcccaggaagtcctgcaatttataaactaaaggtaaacaaacaaaacakaaagggagaaaacttaagacataaccatttctaatatttggaatttaaattacttttcaatagcaaaccttaagcycaggtgttagtgtttcctttaaaaattttcttttaaaaagtgwmttaaaacctttctsagcatctactgtcttattaggcattgttatactttataagtgacatctcatttacctttctggaataattaatattttagggattttacagtttagtagctgtaaactaagtagagctaagatttacattaagttccgtctggtatacaatttttgcttcattaagtgaaaattacctacaggatgacaatttagggatattttaaagragtgttttctaataactattgtctgaaagtagaagggattgcattttgagatagtaaggttttcaagcaaaagacaaaaggtggtttctctagtatataagacgtaattactaaaaatggtaggaagttcttgctagtgtgttgactggtcctgatattctttatagagtaaaatatagtttactaagtaactgttctggagaaaatctacacaaatatgtttggcaaacatttaaaatgtatattgtaatgttttatatattaatgtatactttatcgtgtgtgtacaatattaaattataaatgtatatttgcctttagcctccttctatccccawtatatatgtttcygataggaatttaaaaaattttaattttgaaataattatagatttytttgcacaggaagttgcaaagattgtacagaaagattctrtatgctacttcatttttccccaatgcttatacaggttgagcatttaaaatccgaaatcctaaatgctccagaatctgaaattttttgagcactgacatgatgctcaaaggaaatgctcattggagaattttggatttcagattttcagatttgggatgctctacctgctaagtatcctgcaaatattcyaaagtctgaaaaaattcaaaatctgaaatacttctrgtctcaagcattttgcataagggatactcaacctgtttaacccgaccaaagcacactatcaaaatcaggaattttgacattggtacaatgtgtatgtatagttttctttcattttatcacgtgtagattcataccaccactgcagtcaagatacagaactactctrttaccacagagatcttcctcatgctgccccttttgtagtgmtgctatttacttctcttcactatgcctgacctctggcaaccattaatctgttctccatctttatactttggtgatttcaaaatgttatgtaaatgtcatcatgaagtatgtgacgtttttttcttttttcrttttttttgagacggagtctcgctctattgcccaggttagagttcactggcgcaatcttggctcactgccacctscgcctcccaggttcaagcgattctcctgcctcagccttccgggtagctgggactacaggcacgtgttaccatgtcccgcttatttttgtatttttagtagaaacggggtttcaccatgttggcctggctggtctcgaactcctgacctcatgtgatctgcctgccccagcctcccaaagtgctaggattacaggcgtgagccactgcacccagccaagcacatgacgttttgaggttggcttcttcagtcaccataataccatttgtgatccatattaagttttgtatatccatagttggttcctttacttctgagtagtatttcatggtccacaatttaaccattccctttttttttttttttttttttttttgagacagagtcttgcttagtcacccatgctggagtgcagtggtgctacctyggctcactgcaacttctgcctcccggrttctcaggtgatccacccacttcggcctcccaaagtgctgggattacaggtgtgagccactgtgcccagccttaaccattcacttttgagggacattttggttatttctaggttttggctrttgttcagctgctatgaacaatcaagtacagatttttgaagctgaaaaagcattgaagatgcttccaaagataaatattactgmtaagtttttctccccagtaataagcagctggattttaaatrttartctaaarcrtgaggtctaattgtgcagatttctttactctcttaggtgttatgcctcaaacataactcccatattgggcgtggcaatccagttaatctggtgtcagtagtgttaaagaacatatgtaatgryaggagattsttttcttgcagtgtaacaagttagatactttgaagcaytctttaaagattttctttaataacttgaaggcactgttacacctttcctgtatcagattttttttttttggaattgaaatccatgagatttataaytgtcatgcaaagtaattccatttctcctaaaatttaaggcttgctaaggtaaacagtttctgacatttgtttaatgaatgagagtattactgttgagaaggctttttctctcaagtatgagatagaactttttaaaaagcactcatagtggtttttwaaaawatktttaacatagagtcaaagactagggcttttgcaatagggagagrccagggtwtcatccatctcatccagaagaggagaaattgataaaggagagaggggaatgaaatacagagtastaatggrcggcttggtcttgagagytggggaaagacgagtttaagtaggtaaggtaaaatggaatttatatgtgatagcatcaggtttctcagtgaaggatgaatctaggttataagttgaaagtgagggtcaaaggaaggtatggggaagttgaggaaataggaggtgtgaagtgtcagagtggagaaagtgagtattagtactaaaatggyattttgttttaggcagcaccagtttgatggttgagataatgcaaatgaaatcagttagcttggggttatgatttcccaaatctaagcacacagaaaccagttkgggggttcttctgaggaaaagagggaattagttgaagggatctgtaagcaaacagtaattatggatataagggattatagcattttttgcctgacagaagaaagtgtgtrtatttatatgtgtttacaggtgyttaaaacttgatgatgttattgtcttgaagggarcttgtcatrtggtggagaagtatatttctgaaagtaagggtaygtaggccctcagtgaggtggaagaataagaaggrtggtatggtsgtttcggtggtatgaccaaaatacagattttgaagacctgtgtcagtggcaagtggatggttgaggttcgagtrgaggataacatsactggagatgaggtgattaaggaactgagtagtcagcctgggcaacacagcaagaccccatctctacagaacgttaaaaaaarattagccgggcacggtggtgcatgcctgtggtcctagcttcttgagaggctgatggaagagcatcgcaaatgagaagygagtggccacaaaccctacttcctctcctygtatgtaagttcagagagaaaaagccatcatggtagtgggggttatcctgagatgatactgtcttcatttaagrtcaggaggtgatgacagtgctttgagatggtgatraaggtaacagaacagtgggaggagaggggatgyrggattgagtcagatttaaggagatacagagcagtttgaacataaggaccttgttgctgaggattgactggggaggtctaggcttctgrtggtgactcagatggacaggaatgtgtggcattagtcctggtagtctctgaagagagtatgarctacygcagtaatcacagatgcttttcttcacatacagttcttgaggcttagtttctgggttgtaagcaactctcagaagggaygaataaggtatwtaggatggtgtttttggtggcatcatcataaaactagacatagyggaatggtgstytttgggagcatgacttgtttaaarttgcacaagtgttactctaataatttttctttttccyctctaaataggaacakcttctagattgtgaaggtgaagatggatggaataaactttttgactkgattcagtcagaactttatgtaagacctgatgacgtccatrtgaacatccggctagtggagktgtatcgctcaamtaaaagattgaaggatgctgtggcccrctgccatgaggcagagaggaacatagctttgcgttcaagtttagartggaattcgtgtgttgtacagacccttaaggtagataaaagctattgrgtctttacatttctatgtaggcaattagcatacmtctttttgtactaaagcagcagtgccccgcaggacttaaaatttcttttatttakgtagaacagttataaaaygaaatttttaccaggatcagttraatttataatgggaagrttggggagataactatgataaatgtrtatatttttggtgttttataaggtcgatataaaaatcaatatagtttcacaaatgtggttrgagtgagaaaaggaatttgtaggcttaaaatgrttaatttcttaacatttgattaagttttgtaacttactrttcattccacaaaataggaatatctggagtctttacagtgtttggagtctgataaaagtgactggcragcaaccaatacagacttactgctggcctatgctaatcttatgcttcttacgctttccactagagatgtgcaggaaagtagagaattactgcaaaggtacgttgactttgagaagaatgctttagtayaaattgyagtttttctttttgcagtaagttcattgctctaaayttcttcactgmatcattatttgtataatgtacctaggagttatagttaatacagtgaacarctaggaggcaatcttatttttcttcttttacrgggaagttctaattggttttatatgactttcctttttagagaactcttatagttcaagcttgattaaaattagccttatggttaaatactcagktttgtcatagtcaagcytaaaatgaatgttctaactgctatttcatattttattttttaaaatagtataatcttkagtgaaaattaargttcatctgtcatcagatggctaggttcacatgtaytagtataagcacttagcatcactggtrtttcagaaaatactgttttagctragaaacaaaataactcaactatgtgatttaccttttttcctaaattttgattttgaaaaccagtgtctccattttgaaaataaattccattgaacaaaaacatcacttggatttgtataaaratgttagtttagagcaggggttgrttagaacttgtgggccaaatatggcccctgcctaattttgttaatatttattggaatgcarcwtgcctctgtttatgtattgtctgtggctgcttacatactacargrttggarttgagtggttkcagcagagattgtrtgcctgtaaagccagattagtawtctcctcctttttgtagaaaaagtttactgattgctartttaggctgtccatgtggaagttaatttatttccccatctggtataaggaaagaagttcatttcmctgagtgcagggagtaggtaattttcttgaaaaagtacataaaagtacctaaattggtagggtaagarcagtayytaaaagaactaacataactttaagattattttagaaaacatgtaggatgttttattttgtrttctttgtatactcaaatttttggtcacaagttccttttacatttttsttaaggacatcraagatctttgtatgtgggttcctttttttctttctttctttctttttttttttttttttttttgagatggagtcttgctgtgtcaccaggctggagtgcaatggaacgaccttggctcactgtaacctccgcctccctggttcaggcgattctcctgcctcagcctcccgagtagctgggactacaggcgcacaccaccatacccagctaatttttgtatttttagtagagacggggttcaggatggtctcaagctctttttttttttttttttgagactgagtcttgctctcgccaggctggcatgcagtggtgcagtctcggctcactgcaacctctgcctcctgggttcaagtgattctcctgtctctgcctccggaataggtgggactacaggtgcccgccaccacacctggctaatttttttttttttttttgagacagagtctcgctctgtcacccaggctggagtactgtggggcaatctcggctcactgcaagctctgcctgccaggttcatgccattcttctgcctcagcctcctgagtagctgggactacaggcgcccaccaccaccatgctccgctaatttttttgtatttttagtagagacggggtttcaccgtgttagccaggatggtctcgatctcctgacctcgtgatctgccctcctcggcctcccaaagtgttgggattacaggcgtgagccaccgcgcccagcccacacctggctaatttttgtatttttagtagaaacagggtttcatcatgttggccaggttggtctcaatcttttttttttgagacggagtctcgctctgtcgcccaggctggagtgcggtggcgccatctcggctcactgcaagctctgtttccagggttcacgccattctcctgcctcagcctcccaagtagctgggcctacaggtgcccgccaccacacccagctaattttttgtatttttagtagagatggggtttcaccgcgttagccaggatggtcttgatctcctgaccttgtgatccgcccgcctcggcctcccaaagtgctgggattacaggtgtgagccaccgcgcccagctggtcctgatctcttgacctcttgatccgtctaccttggcctcccaaagtactggaaggtctcaatctcttgaccttccagtaccttgtgatccgcttgccttggccttccaaagtgctgggattgcaggtctgagccactgcacccggctgtatgtgggttatttctatcagtgtttattacattagaaattaaaacaaaaaatgtaatccattaaaaatgtaagaagctctattgtgtgttaataataatagctttttttttttttttttgagacggagttttgctcttgttgcccaggctagagtgcaacagtgtgatcttggatcactgcaacctctgcttcccaggttcaagcaattctcctgcctcagcctcccaagtacctggaattacaggtgcctaccaccacgcctggctaattttttgtatttttagtagagaaggggtttcaccatgttggcaaggctggtcttgaactcctgacctcaggtgatccacccgcctyggcctcccaaagwgctggaattacttgtgtgagccaccgcacagggccaataatagcattttttatgaaaaataaytatttyycaacagcaaaaaagtagtcagaaagtgtcattgcttttgcatttttgtgaatctttttaatgtctygcttaatagaacatagctagattctcatttacttcctctttcagtctgtaaaactattacatgtcatgaagcctctagaaaactcagctcagcggggcgcggtggctcagccctgtaatcccagcactttgggaggccgaggcgggtggatcacgaagtcaggagatcgagaccatcccagctaacaatggtgaaaccttgtctctactaaaaatacaaaaaattagccgggyatgttggcacgcacttacagtcccagctgctcgggaggctgaggcagaagaatcgcttgaacctgggagtcagaggttgcagtaagccaagattgtgccactgcactccagccttgtgacagagtgagattctgtctccaaaaacaaaaacaaaaaaactcagctctacatacatgagaaaatgagtatgtaawatataaatttttttttggtattatygtaaaagtaattttarcttcatggatcccctgaaggggtttttgagcaccctcagagatctttagacctcacttgctctggttgctttattgtaagccactttaaaatcatgcttcacgtttaagtgtttgctttttgcttttacttttcttccaaagtgaggatttggagaaacrataggatttagaagaactaatttagaatatagattacaaataataggccaggcgtagtggctcatgcctgtaatccyagcacattggtaarctgaggtgggtggattgtgaggtcaggagttgaagaccagcctggccaaygtagtgaaaccctgtctctactagaaatataaraaaagtttagcggggcatggtggcaggtgcctgtaatcccagctactcagaaggctgagtcaggagaatcacttgaacctgggaggtggaggttgcagtgagcttagatcgtgccattgcactccagcccaggcgatagtgagagactccgtctcaaaaaaaaaaaaggcagactattttaaaygctgtaatgatctatatagtaaaaagagcaattrctgtattgatackcaaatacctgtcarttayttacttataatttggaaatgstatgtctaatttgagaaattacaactgttaattaaataatgaaattatatgatcaggaagaaactacaaaatagtctcccaactttatcctggtttattttgaaatgtgcacctataatcactratcttatatttatyctgtgattggagggctggaaataactgggaatatcatttgagaggttaagcatgaagtataggaagtatgcaggataaaaawaagcattagatgattcataatttataacayggggaataagaattattagttgaatgtggaagatgaagcttgaaataaaatttttattttgttttgaattaaatraaccatgattattcacagtgcagtaagtgtgtatyatctgtttgatattttcatattacagttttgatagtgctcttcagtctgtraaatctttgggtggaaatgatgaactgtcagctactttcttagaaatgaaaggacatttctayatgyatgctggttctctgcttttgaagatgggtcagcatagtagtaatgttcaatggcragctctttctgagctggctgcrttgtgctatstcatagcatttcaggtaagtcttccacttgtaggagcaattgacatttcackgagtcttgatgtgtttkaaatgaaggtgtgctctggtatgtaatgacaatatgtgaacaaacctgtggaattaaagttraaatgaaatagtcaatttgatacagtggaaaataactaagcatacacaatactggtgaggctggtgaaacagggatgttgartgcactcttgtygaaagcctgcattgccatgatttgtttgtagacaaatttgaagagtttgayctttttactctgccatttttgggaacatgataaagatgtaatctcgtatkatgggtaaagcttgattcaraaagrtgtgttacttggacaaaatcytaataagtagaygtagggcaatggctttatagcctatgatagaagaatatgattgcartttaacatgttaattgaaacacatgtatataacatttatgrctgtattgtgtatatgtaacagtatatctattaatctttgaaaacataaaaccttttcttawtttttatttttttattttttttgagaccaagtctctctgtcaccaggctggagtgcagtggcgtgatctcggctcactgcagcctccacctcctgggttcaagtgattctcctgcctcagyctcccgagtagctgggactacaggcccgtgctaccacacccagctaattttttgtatttttaatagagatggcgtttcaccatgttggccaggatggtcgccatctcttgacctcgtgatctgcctgccttggtctcccaaagtgctgggattacaggcgcaagccactgcgcctggccttttttttttttttttttttttttttttgagatggaatcttgctctgtcgcccagtctggagtgcagtggcacgatctcggctccctgcaagctccacctcccgagttcacgccattttcctgcctcagcctcccgagtagctgggactacaggcacctgccagcatgcccagctaattttttttttgtacttttagtataagagacggggtttcactgtgttagccaggatggtctcaatctcctgacctagtcatccacctgcctcggcctcccaaagtgctgggattacaggcgtgagccaccacacccagcctttttttttttttttttttttaatgagcttgcataacttttgaaaggaaaagaaataagtagycttccaaaaaagcattaaaccacgcttagaaaaatgattgttaattttagagaaggattttttgcttggggagggaaaaaaagrattcattacttttagagaaggcgcctccttctaatataaatctttttttctttttgagacggggttttgctcttgttgcccaggctggagtgcagtggcgcgatctggctcactgcaacctctgccttcccgggttcaagcgattgtcctgcttcagcctcccgagtagctgggattacaggcatgcgccaccacgcccgtctaattttgtatttttagtagagacggggtttctccatgttggtcaggctgatctcgaactcctgacctcaggtgatcttcgcgcctcagcctctccaagtgctgggattacaggcagtgagccaccatgccctgcctaatataaatctttttatttttatttgagacggagtctcgctctgtcaccaggctggagtgcagtggcgcaatctcagctcactgcaacctgtgcctcctgggttcaagtgattctcctgcttcagcctgtcacgtatctgggattacaggcacacaccaccatgcctggctaattttttgtattttttaatagagacggggtttcaccatgttagccaggatggtctcgatcttctgacctcgmgatccacccgacttggcctctcaaagtgctgggattacaggcataagccaccgarcccggcctgtaaatcttttaaaaacaccgttgatagacagttcacatgttaagtgctaatatttgctcagtagaaacttctgtgttcataaggaattggattagtgaaaattaatggatttagtgaggttcactaggtaataccaacattaaaaggttcttatagaaattctcaagtaactgatagttcttatttttatttattttttttgagacggagtctcactctgttgcccaggctggagcacagtggcacgacctcggctcactgcaagctccacctcctgggttcacgccattctcctgcctcagcctcccgagtagctgggactacaggcacccaccaccacgcccagctaatttttttgtattttcagtagagatggggtttcaccatgttagccaggatggtctcgatctcctgacctcatgatccgcccaccttggcctcccaaagtgctggcattataggcgtgagccaccgcgccctgccaatagttcttatttttaatggaaactttaaaatttatctgtctgtgtgtctattagagtcttgctgtgtcacccgggctggagtgcagttgcataatcatagctcactgtaacgttgaactgggctcaagcttccyagagtgctgggattgtaggtgtsagctactatgcacagcctaaaattttttgatatgtagttttgggaggcagagtctcttgttgctctggctggagtgcagtggcatgatcatagctcactgcatcctcgaactcctgggctcargtgatcctctcctgcttcagcctcagctcagtagctgggactacaggtgcctgccaccatgcctggctacattgttaaattttttgtaaagacaaggtcttgctatgtttcccaggctggttagtcttgaactcctggcttcaagtgatccttctgccttgccctcccaaagtgctgrgattacaggtatgagccaccacacctgactgtgaacttttaatmataawaagttagtttccctcttaatccattcactcaggtctcctttcctagatgacarctactgttaggagtttcttgggtgttcagaaatattttttgcatatgcaaatgtgcaatacattctttctctgcttttaaaaaatattgtgcctcaatgtgggtgtgctttacctattgccagatgccttgcttttctraatgtttcttcattgttccacttcagcacagagatacctacytcagtctttattaactaccacatatttctgtagaatgaatatataatagaaacatcttagatgcttgtattttatttkatcagtttattttaaagcttaatgawcaaatgattataagcataaaatgtaggttatgtgctggcatttgggtatktaagaattggctaacttttatggcaagattttcagactcttaatcagaggaatactgtggttctagtaagtrcatctgcattgcagctaggtagttracaaagtatcttgaaaccttttagttaagatgaggaaatagccaggcacggtggctcacgcctatgatcttagcactttgggaggctgaggcgggcggatcacttgaggtcaggagtttgagaccatcctgaccaacatggtcaaaccccatctctactaaaaatacaaaaattagccacgcatggtggcgggtgcctgtaatcccagctacttgagaggccgagacaggagaattgcttgaaaccaggaggcggaggttgcagtgagctgaaatcgtgccactgcagcactgcagcctggcgacagagcgagactccatctcaaaaaaaaaaaaaggaaatagtgaattgagatgayttgattgagtggattcacaactaattaactggtcacarattcaactrttgaataattttgtaaaagaggccgggtttatgaattgaggtcagtttcaaaacaaaaagaatgatgtcaacattttgtttcttaytttgtgtgctcttttcaacatatagatgacaaagggctttgacatgatgtttagaaaacttgtgagtaaaaggataggcaataygaatatttctaaaattcaaaatcagaagcttttaggttcataaatcatatattttgaaaaatgarcatrtttggaaagaattatatatacatggtttaaaattctggmggctcttaagaatatgctatgaagactcctttctgttccctagttatttactttctccascyccaaagaaactaatgttattgctttcttgtgtgttcttcaggaaatgttttatgcatctccaagtaaacacayatatatcycctgtctttaaargaaggaggaaaacrtttgaacattgcatttactttatttccattaactgtatcttggagatgtttccatgtcagtatatataaagggyattctcattagtttggatgcttgcatattattccattgtatggatgtactgtagttttggagtttttaaaaccagggtcctaaarccaggacattagctkgcttttacttttktttttttwwatgctacttcaagtaatttagcaatgattaacttgtgccatgaattcctgaaagaattgcagtatcaaagtatatctgtgcatttataatttttagagctgttgccaaatatctaaccctaaagaggttgtatcaaattacatttccaccaccaattaagaaagtggtgatagaattaaaagccgatgctctagtcacccatatagttacttttggcatgtttctagtaagygggcattgcctrtgactggacgttttcagtgatggrcattcattacttttcaagatagcccagtgcatctttaggtggtttggctcttggtacttccttatatagaataaaaatattcttcaagccttctacctgttggtcttgtttcttcttttgatgatttcttttataaaataattttaatatttgaaggcagctgtcacgtcttcccttygccattctattcatcatgctttttttttyyataggttattgcatgaggatctctttaatttcctggttgtcccatttattcyagtgctatcccmtattatccatactctgaaaatgtgttatctacaatgtggcatttccaagtgtcatttcacctgtrctttttaaagtagggtgtcatatctactcaaataggacaacatctgctgttgtcctatttatgcagggtmgaaaagtaatgtaattaaattttccatttctctgaatgtaacatgaatgtgcttttagtagaaactaatttctcagagttgctctgtgtatgcttttttttttttttctttttttggagatagggtctcactctgtcgcccaagctggagcacagtggcatgatcatggctcactgcagccttgacctcctggatttaagtgatcctcctgcctcagcctcctgagtagctgggaccacaggtgtgggccaccatgcctggctaattaaaaaaaacattttttagagatagggtctcaccgtgttgttcaggctgttcttgaactctgggctcaagcgatccccccaccttggccttccaaagtgctgggattacaggtgtgagccaccatgtctggccctttttttttttttttttttttgcgatggagcctcgctctttcacccaggcyggagtgcaatggcrcagtctcagcccactacaacctctgcctcccaggttcaaactatccttgtgcctcagccttcyatgtagctggaattaayaggtgtgtgccaccacgcctggctctttgttttytttttattatttttagtagagactgggtttcaccatgttggccaggctggtctcgaactcctgacctcaagtgatcagcccaccttggcctcccagagtgttgggattacaggtgtgagccaccacgcctgtacctggcctatctttcataggttatataaattccttggttcccagtttytgcagtcttttccaattcagtttaattaatggttaactgttyattcattatcaaaaaaagtacagtgtaatagayaagaccatgttactattagaagtatgggtatcatcaaattaagatttttgattctaaaattattaggttccaagaccaaagattaaattaakaraaggtraagctggacaaaatctgctggaaatgatggcctgtgaccgactgagccaatcaggtaatagtaatattaaactaatttaatttaaaaagaaaaaggaatttctgttaaggcatatcttatgataaaatctycatctgtycaggagataatttgtcaaaattatttcttttygccgtatcagttaagagcaataggtatggaagagatgcgaagaaatagcacattctttwaaaaaatgaatatttgatattgtttgttcctakgtggagaggatttcttaactctttcttyatctggctgctagagcctctakcctgaatatttagtcacttcctgaactaagtataattattgrtttgccaaccatttaacaccagctgattctaaaaacactgctgtggggatataaagatgaagaagatacgsatctgtcttaaagarctgagagcgtagggaggaagatagaagatatatacttaccttatattaggctcttggaatttgtggattttttcccccrtttttggcttgggatraatcctaaaggtctgttgcrtattacctgtgattttgctaagatacaaactttaaggtagttagrtggccattgaatcaagcagtgaactgaagaaacataatgcttyctataaggagcagttytgatataaaattggatgaattttgtaaagagcaagatgtaatattaaatcaaagttattataagctttrgtgtatagttaggctgttggccaragctcacattgctcttttattccatagcycacttttttttgtgggagytaggctttcagtccttaaagtgactttctactttttyccttttctcttttccttctacccttgcagggctctcataagtgcctttgcrtggtgtcacagttagatraaaattgcctgtatyttttttwatgtctttgatctgggcatyccgagggtgcctctgtaagtgtgctgagacacaactgtgtagtggtaaccaaacctaattgcccagcagaattaactcgaaggagggtttttaaaaaaagttcaattgaaatataattcrtataccatacgcttcacccatttaaagtgtacrgttcagtggcttttastatgttcatagagtattaycactgtcaccacagtcagttttagaagattttcatcactccrtgaggaattccttacctattagcagttacttcccattttacccaaacctctcagccttggcaacygctaatctgtctctgtaggtttgcctcttctgaacatttcacataaatggaatcatatagtatgtggtcttttgtgactggcttctttsatttagcaaggttttcaaggttcatctgtgttrtagcatgtatcagtactttatccgagactatgattttttgattgcttactgtaaacctatggaataaaaaactctgggaacgaggcctggaaataattcttttttttttttttcctgagacagagtcttactctgtcgcccgggctggagtgcagtggcgtgatctcggctcactgcaagctccacctcctgggttcatgccattctcctccctcagcctccccagtagctgggactacaggcgccagccaccagggccggctaattttttttttttttttgtatttttagtagagatggagtttcactgtgttagccaggatsgtcttgatctcctgacctcattatccacccagcttggcctcccaaagtgctgggattacaggcatgagccaccgtgcccagccggaaataattcttaaaagctgtttaaaggaggattctgatcagccaggttyagaaatcagtgtatcagatcagagaataagagyttgtccctgttctcctatggccacttaaatccagaccttttcatctraaatgcaaataygtttggcatttttcatacacattcctgtcttttttcccccttctgctgtcttatgtagatactgagaatattaaacctgtactcttctcatttgctacataagcaccggttttgttgtccagctgtattttttgggttggagggttaggtatgcagtaatcatrttatttcccctttgggtatacaaatgagacaacgtgagcaaatacaatctgtawttttaaagtgatggaaataacttaaatttttttttcagggcayatgttgctaaacttaagtcgtggcaagcaagattttttaaaagwgrttgttgaaacttttgccaacaaaagcgggcagtctgcattatatgatgctctgttttctagtcagtcayctaaggatacatcttttcttggtagcgatgatattggaaacattgatgtacragaaccagagcttgaagatttgrctagatacgatgttggtaagttatatgtttcagaggaaatggtctccgtcttaattcttataaattgcccataatcttattacccagaaataacgacttaatattttcctgtattccttttgtgtgtgggttgggctggggggagtttgaatgtggtgctgtgggggtggcatgtattttttgttgttgttgttgtttttragaccaagttttgctcttgtcgcccatgctggagtgcagtggtgcgatctcggctcactgtaacctctgcctcccaggttcaagtgattctgctgcctcagtctcccaagtagcgggattacaaatgcccgccatcacgcccggctaattttttgtatttttagtagagacrgggtttcatcatgttggtcaggctggtctcaaactcctgacctcaggtgatccacctgccttggcctcccaaagtgctgggattacaggtgtgagccaccgcgacctgccttgttgtattttgagacagggtctcgctgtgtcacctgggctggagtgtagtggcatgatcgtaggtcactgataccttgaacttctgggctcaagggattctcttgcctcagcctcctgagtagctggtaccataggcacatgccactcggcccagataatttttttttttaattggtagagacagggtctccctttgttgcccaggctagtcttgaactcctaggctcaagtgatcctcctacctaagcccccaaagtgttgggattaggcctggcacagtggctcatatctgtaatcccagcactttgggaggccgaggcaggcagatcacctgagatcaggagttggagaccatcctggccaacatggtgaaaccccgtctctactaaaaatacaaaaattatccgggggtggtggcatgtgcctgtagtcctactcaggaggctgaggcaggggaatcgcttcaacccgggaggcggaggttgcagtgagccaagatcacactgctgcacgacagcctgggcgacagagcgagacttcgtctcaaaaacaaaaagtgttggaattataggcawgagccactgcatctggccatatttttcatctaaatggttgtttatgtatgatttatcttgcttccttcatgaattctctcccacagtctstgtattaaaactataaatatcacttttattggcaatataatcttttttatgaagtagtcataatttgcttgctactttctgttattgggcatccaagttttctcaacttttccactgttaataatcatactctgataaaaacttcaacaaaaagtgtcttcattgcaagttatttccatagagatacctawawacakaattagagacaaaggmcatgaacatctttaagtcttgcaaattgccaaaatgacagaaagattatacctcttyatgcttccagaagcacataaccttttcttttcttttcttttcttttcttttcttttcttttcttttcttttcttygagacagagtctcgctctgtcacccaggctggagtgcagtggcgcaatctcggctcactgcaacttccgcctgccaggttcaagcaattgtcttgcctcagcctcccaagtagctgggactataggcacgtgacaccrtgctcggctaattttttgtatttttagtagagrcggagtttcaccatgctggccaggctggtctcgaactcctgactgcgcagaaccttttcaatattgactttcttgtagaaaaacagatttctttactgtacygatggattaatatagtggtgttccattgctttaatgacttaaagsaaaacccatygttttggggtttcttattaggttaggtgttctttatttggcttttgtcagttgattttggtttattgagttctagtcagtgtcattttttaagatggacttaaacattcttcatcactactatttttattaaaatttctagaaataatcaagtgagaatgcatttaataagaasatgagaytttgcctaacatagaattccctycagctttgatatagaaaagcagttatataattaagatatatataatgtgaattgtttatgttggcaaaactaatggcacaargaaaaatttcaaacccttaagccaatttttwwattttatttcaggtgctattcragcacataatggtagtcttcagcaycttacttggcttggcttacagtggaattcattgcctgctttacctggaatccgaaaatggctaaaacagcttttccatcrtttgccccakgaaacctcaaggcttgaaacaaatgcrcctgaatcaatatgtattttagatcttgaagtaagcaaagattttaacaaattaaatattctgaattttgtttaattttttttctaacttaacttttccttaaatraaacaggtatttctccttggagtagtatataccagccacttacaattaaaggagaaatgtaattctcaccayagctcctatcagccgttatgcctgcccyttcctgtrtgtaaacrgctttgtacagaragacaaaaatcttggtgggatgcggtttgtactctgattcacagaaaagcagtgtaagtagtaaaacaaaaatattgctttcacttagtgcgtaggttttaccrgggatttaatcctcrtgtgaagatttaatttgtcatgtgacccattaacatatatgtatgtaagcsctgaactgtgtatttagaaagcaattttagtaaattgaactattttttagacctggaaackyrgcaaaattgagacttytagttcagcatgaaataaacactctaagagcccaggaaaaacatggccttcaacctgctctgcttgtacattgggcaraatrccttcagaaaacggtgagttttaaagtataagcatttttaawgaacattaccttaattttttaaaatcatgaactttttattgaaagtttttttgttctgaaaacagcagcttggtcayattatgacagatgtgttttttattgctgcaaaatagttaatgtagttaaatataagcacttagaggagcaatgcctggcacacagtgaatgttacatattagctgagctgttactgttatkccttaataattaagttctgataattattyagcctgaaaattaaaaaaaaaaattagcacaaggctttgtaggtaagaccattatagatctttctawatacttaaggtgtgttttgtgtcaccatgaggtgtagatggtcagccttttgaacaaactgacactacagaagaggcaggtttcagctatctaaaaatggcaactgttaaaaagtagtttggattgctacgttaggatggtatcattagaagcgtttaaaagttgagtgtagaggccgggtgcggtggctcacacctgtaatcccagcacgttaggaggccgaggcgggcagatcacaaggtcaggagatcgagatcattcctggctaacacggtgaaaccccgtctctactaaaaatacaaaaaaaaaaaaaaaaaaaraaaaaattagccgggcgtggtggcaggcatctrtagtcccagctacttgggaggctgaggcaagagaatggtgtgaacccaggaggcggagcttgcagtgagccgagatcacgccactgcactccagcctgggctacagagcaagactctgtctcaaaaaaaaaaaaaagttgagtgtagaatgatcactggtgttaaggtggtttagttattacagtatttggaagttgaacaaatgactattgagataccatttggttttgacttgaaattttagccagttcttwcaacttgtaaatgaactttagatctaatcatgcgtgttccttaaagttgtgtgcttttaactttcttttttagggcagyggtcttaattcttyttatgrtcaackagaatacatagggagaagtgttcattattggaagaaagttttgccattgttgaagataataaaaaagaagaacagtattcctgaacctattgatcctctgtttaaacattttcatagtgtagacattcaggtaacagagttcctttatgaatttattggagatgggaatttccagtttataaacaaagacrtrgagctatamactgcttaaattaattgccttgttatttaaygktaatcttgttttctaaattcactagctctcacasataagatatgacagagaagaataatgagatgtttgtctcttaagatcatataaaatctttggaaaatcatttgggttttatattctgagtataaacaatttgactaaaaactattctrtgtgtttaggcatcagaaattgttgartatgaagaagaygcacacrtaacttttgctatrttggatgcagtamatggaaatatagaagatgctrtgactgcttttgaatctataaaaagtgttgtttcttattggaatcttgcactggtaagtagatgcagtacttgagctaaaagttttatttatttatttattatttttttaaaagacggggtttctctgttggtcgggctagagtgcagtggcacaatcttggctcactgcaacctctgcttcccaggctcaagcgattcttgtgcctcagctcccgagtagctgggattacaggcatgagccaccatgcgtggccaagctaaaagttttttgttttaaaaacctaatgatttcataaaagcactatttgtatagatttttcacaggaaggcagaagacattgaaaatgatgccctttctcctgaagaacaagaagaatgcaraaattatctgasaaagaccagggrctacctaataaagattwtagatgacrgtgattcaaatctttcagtggtcaagaaagtaagtagcaggttgttgtatgtacgttcttactgataacccactggtcartgtttttgcgttggtcttatattttggtaatttcaaaaatactcagtaatatgttgttattaatgcacagaagggatrygtgtgtctaaatgcttakatttgcttgctttgtcttaggtttggtgtgtctttttaaacttgggaatctaggtatatgctcttaaaaagtacttcttggggaattagaaaagatttctaagataagacattgattttgttatcttagcagtgtaatcaaaacaaatattataacctcaggactaattcttaatgaactttgctgaaattgaaagttgttgctgacaacttaagagcatttcttctcatcstcatcagccattrtgaacgcccttgttttcttgctgtcagctgtttgagattgtcatgatgatgttaaattatgttcagtcttctgagtgttttgttgrttaatttgtgttactactcttttattaggatttatgttgtctggtgtattgtagcatctgtatttctgtcaccattgaaaatcagttagaaaacatcagtaacttattttgttcacttggaaaagctttccaagttaacattcctctacaattatcatggttaacagaagtaatagaaagagcatggactttagaatcagaagatgttagaytgtacaacacttttctgtgttcmtgaagraaaaaatakaataaagrcaaaaaataataataatacaaaacarcagaaaaagaaaaaagataattaaaaaacactttcacgtgtattatttaaagtgtaaagtgcytattaaartgrcaaaaatgtaaataagataaaatatatcattttagagtttttacttttggaattttttgcaaatgaaagcccttaattaatgtcttttatttttagttgcctgtgcccctggagtctgtaaaasagakgcttaaktcagycatgcaggaactcgaaractatagtgaaggagrtcctctctataaaaatggttctttgcgaaatgcrgattcagaaataaaacattctacaccrtctcctaccaratattcactatcaccaagtaaaagttacaaggtaaacaggaaagaatggaatcatttcattgtgaaattgtttctgttctaagtgttttaaatgctgttttgtkatttttattttttttwagtattctcccraaacaccacctcgatggrcagaagatcrgaattctttackgaawatgattygccaacaagtagaggccattahggtaagtcacttaatttctctagctgtactttttattccaagattccttccctggcyactctctcactttttttctgaagctggtcagaatgtccccttgccatccamatagtatggcaaggggacattttggtctttttttttttttttaagrcagggtcttgttctgttgtgcaggctggagtacagtggtatgatcacagcttactgtggcttcgacctcctagctcaagagaggctcttggctcagcctgccacgaagccaggactacagacagtcacacgccaccaggcccagctaattgttgtattttttatagagatgggattttgccatgttgcccagggtggccttgaactcctggctcaaagaatcctcctgcttcagccwcccaaaktgctgggattgcaggtgtgagccactgtgcccagcctacatacctcggtcttgaccctttaccatattttgttttgttttgttttgagatggagtctcactctgttgcccagtctggagtgcagtggtgcgatcttggctcactgcaacctccacctcccaggttcaagcgactctcctgcctcagcctcctgagtagctgggattacaggcacccgccaccaggcccagctaatttttgtatgtttagtagacacagagtttcaccatgttggccaagctgtttttgaacttctgacctcaggtgatctgcccgccttggcctcccaaagtgctgggattacaggtgtaaacccccgagcccagccctttaccgtatttttgaaagtactttatgtgtctctctcttcatcttccacaaaatttgagaccttcaaaggtagaaactgttttatttaaaatataagagttcgtggcacagagaaggttcctgagtgattgaastgctaccrtgtactaatcatactctggtctatgagttcattcycagattagctgtggattacatgtgtttcaaatgtatagctaggaatygaaaagtggtctgagcttcaaaaagtcttrctatattttaatacttccatatgaatttgacttcattatgtaaggaaatagttatgtatatatatcktattttaacaatagggttcaaaggagcttgacttttttggaattggaaataaaagtaggttctttcatgtttatcargcaakaactaaattaywcatactgctaaggttacatcaaggatatgctgatgtgtggcgattattacagtgtgatcagcagyatttgcaacttaagagaatactgtgtggtggggaagacatttttgaatttgcacaaaaatyttgaatgttaattctgtgtagtcrtggcctatgacaattacatacaattttgacttaacatacaggtttcaggctcccaacattgtattctgtggaagtatcgtggagcacyratccatgagcttgaaaagcttggtactagtactgactctgccattaattaatgatcttgggccagtcacttccatygtgacygtttggcttcttatctttaaaatgagagaattacygaagccagttctcatyacactgaatgttaaaaattacagttacagcagtgattgcaaattcaaagctctggtgcrgataccarcagtgacyataaagttttctaggtgattccactagtttcttattrgatgtgtatgtgtagcatctggactaggcaytgtagatggatgartgggggaaattttatttagcttgaaaattgagatagttttggacctcatggttaggtctttctgggaaatttttawttgaaacacttgtagaaamagaaagcagacatgctagatctgtccctgacctcacttgttagaactgrtcggattcctgggctgatacagagaagtttgaaacttttcaaaatttacctgttttctgataccactacaatttctttggaaaaagaatttcctgttaagtgtctgttttgtaaggggacattttgtaggttctagggttgggtatggtgctgtcatttagttttcttcagcagagatsargtagccacatarctacactagacggcattgkatctatctgccatcttgtcaaggcagcagagttgtgttaagaraacatttttggagtcagatstgkttcaaattccagctgttattccctgcatccstttctctcattttaagataggagctaatattgtttacctaacagtgtagatrgtrtaaaaattaagagtttaagtgcattggacgtattattatatacataataaattmtctgcagctactrcttttttccctttcctggtggagcatttgaacrtcaccttgagaattagttgtattytgtttcagcatggggttaagtgaaaagctaatttggggaggtaacgcggaatgtcaggtagtccagrttgcagtryagaaagaacacactgaaaggatggtcastgtaatgttagaggactgtgaaagttgrggaaagaagtttagtttgtagrtacttgtttttttgagcagggaattgtcttggctggaggtgaaygtcagaaaggttaatgtaggcaagtgtagaatggaaatgaaggtgtgatcatttaggaggttatttgtttaggtgagagttaataaattargttttgtattaataaatgaaaatgggagcagataaatttttaacaaattaagaatcatattttaaaatcagcaccaggtacctagaactcwctggcaaatagaaactttcaaaagatataatcaggtccgggcgtggtgggtcacacctataatcccagcactttgggaggctgaggtggtgggtcacttgaggtcaggagttcaagactagcctggcaaacatggtgaaaccccatctctactattacacaaaaaattagccaggcgtgctggctgacgcctgtaatccgagctastcagggrgctgaagtgggagaattgcttgagcccaggaggtggaggttgcggtgagccaagattgtgccattgcactccagcctggaygacagatcgagacaccatctcaaaaaaaaaaaaaaaaatcagttatttaaatttaaaagagtaagtttccccagcactgtttctgkcatgatataattaaatgwttaaaattatttgatttttttttcttccaatagraagaaatgcaggagttgaaactaaatagcagtaastcagcatcccrtcatcgttggcccacagagaattatggaccagactcrgtgcctgatggatatcaggggtcacagacatttcatggggctccactaacaggtgagctggcaagtgsataatcgcatattttagtaaaactactttacttccctcttttaagtagataacrtgtgaaatcaccttgtttatatatgtttgttaatatacatgtcaacgtctgtttatatgtgacttcaaaagctgtattwggtgttacggagatttttataatcccaagcagaaaaaacgagccgtatgtgatcacgtgtrtataaaggcttaaagaacacttaatccacacctcagatgagctgagatgagattattccttaaattgmaaaatgttawtgaatagrgttatgcactaagaaatgcttaattaagaacctacacctctggggaattattttgatgataatgatgagaggcaggacgttatataggaaatcttacttaatttgaaatattatggttatataaagaaagaaaaggagtttggacctgaatcatacwgggtttttaagttctgctctatcacttactataatagctgtgtaagwtaacctgyctgaaaygtggagataatacttgccttacataattactatgagcatttgtgtatgtgcaggtgggcrtgggtgtgtatcagacatttattagagtatacagtaaacagttaatgaactaaggttactaatagtgtttactgtgggttggctrtgtgcaaaagtgctktgtgaatgtaatttkatytaattacagtaacttagaatggccggtaccattattaatcccttttttataaataaggaaattaaagaaaggttaggtaacttactcattattatacagctagttattgatagagctgagattcacactccggtggtgtaactccaaagcacttgccagtataatacattgctcccaggcagcgagaaataamaaaattgttccttttaygtacgacagacttctgaaatggtagtagtagtagtgccctttttttttctctttttagcccaggaaagatttagaawaaaatctrgtttagatgagcacatttgtgtgatggtycmtatagttaaggcaaccccactagccttttgtgatagtatcttctcaacacaagcaaaataacagaaaatctttgtgaartcaagcttattaaatgtcrtaagtcatagataagtatatgaaatgtctaacgttcaaaccttgttttcttaaaaccttacacatcatataggtccttgtaagaggataaacaaaccggctagcctttcctggggcttttttagtgatgtgtgcagtcagttatttggtgccttktgggtcatgatttccatttcttctgtgtacaggcataaaagrtcttctgttcttatacaagcatgtaaatccaacattctcattgtctcattttattcttgcaatgaccctgtgaaatntgtagaagcagcayatcstcattttacaattgagaaacatggagactccaaatggattatttacaggttcacaaaacagctttgtggcactgaaagggcgagagcyaagatctcctgatttctgttcctgtgttcatagattctttttccttaataaaagtaaacatatatcaagatggtccttgttttttwaaaataagatgattaaaattaaagattaatgagctcataggagatactcagaagtactgaacagggtgaagaaaactaaaarctaaccacctyattwacatttcytatatttgagagcatttccttctrgttctttctctatacatatagtattttttatgagattgttaccatgttactatgttgtgtgtagatgagctagcctgtttttwaaatgttactttagttctgagcatttttaaacttaaatgttttttgaayattaatgagttcatggtrtcccatcacatggaagtactgtaaattctgttcctttatttatgttgtttctggtttatgccattacaaattctaggacactgtcctagttttrtagggtattcagaatattcagtttatgctcttaccactagtatctgatagtgccattttcgcactttgctaatgctgacttactggtttataaaatcctttgccaatttgtaggaacaaaagtkatatcaatttttaagtttttttaatactagtcatggtcamcaattcatgcaaatggcagttggtagttttgccatcttcaacgtgggtacctcccagttgtttggtttcttggtaaaactcacacaaaacagatggagaagagtttgtatatcaacatgaatgttaatgtgatttttttaaagcccgcgaacacatttgtgttccttgtgakctcctktgcrtgaatttgtcaggtaatttttttgacytgaacattctcataatagcttcartttgcmcaatgcaacctyrtcattttgcggatttttcaaggctcacttcaaaaacatgttccttgaggcctattaacatttctttcctaaattgtctattcatatggtgctttwaaaarttagattacttttagtakatttattagagcckcacagtttagagtcagtagtcaattaaagtccctacttaaacttcagactaagattttttttttatttaatattttattttttctttttgctttcatgcagacagacatyttgcaakactttaagattcttgggccatttctgtcaggttgttctgtgttctgtgcctgcttcctccccatagtaatttcaaaatagytatcctcacctctgtaaggtttccraaatcaaacttgggcttctggctagccttttctrggtcttgatttttcagtgctttccagaggcaattgtttggaacctcttggcacagtttctgtttctyyttccatgtacaggcatraaagrtcttttggttgttttctggtaaaactatcataaaacagttsaagcaaatgactattggtagttttgccattaacakgggtgccttctagtyattttgtttcctggtaaaacacacmaaacagagggagcagacagtttgtacatcwgcatgaktgttgatgtgctttttattttaagccagggaacacattttatgttatttatgacatcctktccatgaatttgtcaggtgatttttgagctgaacattctcagtaatarctttagtttacaaaatacaacctastctttctgcagattttctaggcccacttcaaatgcattgaccatcagatggcatcttggttccttacgtcctttctgtgactgaatgtccataattccacatcatactgatctttcttagaaaaggcaacagttactttcttctttattccttttttaatgcttgtgaggtagttgttcttgttgatcacagcratgctattctctyattcttcatgtcatatttagcartttttttctagtttgtcatttgataatcttgattggtgtattttgatgtacagaaatttaaaatttatgtagttaaatctttctttaayttctattgcytttgtatttrtagctcttgmctagatagtcttaactgtagtatagactttaacagtgttttctttmytttctttttkttttttyagttgcaactactggcccttcagtatattatagtcagtcaccagcatataattccccagtatcttctcagaccagcagctaatgttactcccacaaaggtaacaaaggaataatttatacatttataattatttyctttttaaattgtttagggttccttcaaataaattcaagagagcagttcactattaaaacttttatgtcccttaaaatgtagatattttaaatttatctccaaatacagaaattatccttcttagtcaccttatttttgwgttartaagtgtgaatatttagaatattttaaaaatgggagtggtggtggtggatccttcatcgttctgttttaacagaaatagaactgtaatgcccttgctgacccactatgtggtaagtactttcaggcctgatacagctatatatataacaattgattgaagactcaatattacagtggtagttgaatgtgacagctttgaggayagagtgttggggtgcatttagacccttgytcttctgcttattttgaccacaggcaagtttcttaacctctcaatgcatcagttgcctcatatgtaaaatgaggataataataataccttaattcatagggtttttgaggatattaaaatgagataataatgtaaagtgcttagaacagtgcccagctggcacattaataaatgctcaataaatgttaccatcatcatcatcatcatcatcatcatcatcatcatcattaacatcatttgataaattaggaatgaagaaggtatttattttatgactttagctgtagattttaagatgctatacataattttcattatatgccaagtatatatgcaagtatctttgtagtaatgtggttttctcttaacctacttatgcctagtgctccattattggaacactaagcttatgggagttatttatatcctactgctcaaggtcattgccaaggtctgatttttcacacagaaaatttgcagcctctggcataaacgggttaatgatgtgtactacatcccctaatgagatcttcttcacttcatattcatgtttgaagtttgtgagaattggtttgcatttagttatctgtagttttgtagacaatctacaaaatgttttaactttctgtcttttagggcccagtctatggcatgaataggcttccaccccaacagcatatttatgcctatccgcaacagatgcacacaccgccagtgcaaagctcatctgcttgtatgttctctcaggagatgtatggtcctcctgcattgcgttttgagtctcctgcaacgggaattctatcgcccaggggtgatgattactttaattacaatgttcaacagacaagcacaaatccacctttgccagaaccaggatatttcacaaaacctccgattgcagctcatgcttcaagatctgcagaatctaagactatagaatttgggaaaactaattttgttcagcccatgccgggtgaaggattaaggccatctttgccaacacaagcacacacaacacagccaactccttttaaatttaactcaaatttcaaatcaaatgatggkgacttcacgttttcctcaccacaggttgtgacacagccccctcctgcagcttacagtaacagtgaaagccttttaggtctcctgacttcagataaacccttgcaaggagatggctatagtggagccaaaccaattcctggtggtcaaaccattgggcctcgaaatacattcaattttggaagcaaaaatgtgtctggaatttcatttacagaaaacatggggtcgagtcagcaaaagaattctggttttcggcgaagtgatgatatgtttactttccatggtccagggaaatcagtatttggaacacccactttagagacagcaaacaagaatcatgagacagatggaggaagtgcccatggggatgatgatgatgacggtcctcactttgagcctgtagtacctcttcctgataagattgaagtaaaaactggtgaggaagatgaagaagaattcttttgcaaccgcgcgaaattgtttcgtttcgatgtagaatccaaagaatggaaagaacgtgggattggcaatgtaaaaatactgaggcataaaacatctggtaaaattcgccttctaatgagacgagagcaagtattgaaaatctgtgcaaatcattacatcagtccagatatgaaattgacaccaaatgctggatcagacagatcttttgtatggcatgcccttgattatgcagatgagttgccaaaaccagaacaacttgctattaggttcaaaactcctgaggaagcagcactttttaaatgcaagtttgaagaagcccagagcattttaaaagccccaggaacaaatgtagccatggcgtcaaatcaggctgtcagaattgtaaaagaacccacaagtcatgataacaaggatatttgcaaatctgatgctggaaacctgaattttgaatttcaggttgcaaagaaagaagggtcttggtggcattgtaacagctgctcattaaagaatgcttcaactgctaagaaatgtgtatcatgccaaaatctaaacccaagcaataaagagctcgttggcccaccattagctgaaactgtttttactcctaaaaccagcccagagaatgttcaagatcgatttgcattggtgactccaaagaaagaaggtcactgggattgtagtatttgtttagtaagaaatgaacctactgtatctaggtgcattgcgtgtcagaatacaaaatctgctaacaaaagtggatcttcatttgttcatcaagcttcatttaaatttggccagggagatcttcctaaacctattaacagtgatttcagatctgttttttctacaaaggaaggacagtgggattgcagtgcatgtttggtacaaaatgaggggagctctacaaaatgtgctgcttgtcagaatccgagaaaacagagtctacctgctacttctattccaacacctgcctcttttaagtttggtacttcagagacaagtaaaactctaaaaagtggatttgaagacatgtttgctaagaaggaaggacagtgggattgcagttcatgcttagtgcgaaatgaagcaaatgctacaagatgtgttgcttgtcagaatccggataaaccaagtccatctacttctgttccagctcctgcctcttttaagtttggtacttcagagacaagcaaggctccaaagagcggatttgagggaatgttcactaagaaggagggacagtgggattgcagtgtgtgcttagtaagaaatgaagccagtgctaccaaatgtattgcttgtcagaatccaggtaaacaaaatcaaactacttctgcagtttcaacacctgcctcttcagagacaagcaaggctccaaagagcggatttgagggaatgttcactaagaaggagggacagtgggattgcagtgtgtgcttagtaagaaatgaagccagtgctaccaaatgtattgcttgtcagaatccaggtaaacaaaatcaaactacttctgcagtttcaacacctgcctcttcagagacaagcaaggctccaaagagcggatttgagggaatgttcactaagaaggaaggacagtgggattgcagtgtgtgcttagtaagaaatgaagccagtgctaccaaatgtattgcttgtcagtgtccaagtaaacaaaatcaaacaactgcaatttcaacacctgcctcttcggagataagcaaggctccaaagagtggatttgaaggaatgttcatcaggaaaggacagtgggattgtagtgtttgctgtgtacaaaatgagagttcttccttaaaatgtgtggcttgtgatgcctctaaaccaactcataaacctattgcagaagctccttcagctttcacactgggctcagaaatgaagttgcatgactcttctggaagtcaggtgggaacaggatttaaaagtaatttctcagaaaaagcttctaagtttggcaatacagagcaaggattcaaatttgggcatgtggatcaagaaaattcacyttcatttatgtttcagggttcttctaatacagaatttaagtcaaccaaagaaggattttccatcsctgtgtctgctgatggatttaaatttggcatttyggaaccaggaaatcaagaaaagaaaagkgaaaagcctcttgaaaatgrtactggcttccaggctcaggatattagtggccrgaagaakggccgtggtgtgatttttggccaaacaagtagcacttttacatttgcagatsttgcaaaatcaacttcaggagaaggatttcagtttggcaaaaaagaccycaatttcaagggattttcaggtgctggagaaaaattattctcatcacratrcggtaaaatggccaataaagcaaacacttccggtgactttgagaaagatgatgatgcctrtaagactgaggacagcgatgacatccattttgaaccagtagttcaaatgcscgaaaaagtagaacttgtaayaggagaagaagatgaaaaagttctgtattcacagcgggtaaaactatttagatttgatgctgagrtaagkcagtggaaagaaaggggcttggggaacttaaaaattctcaaaaacgaggtcaatggcaaacyaagaatgctgatgcgaagagamcaagtactaaaagtgtgtgctaatcattggataacgactacratgaacctgaagccyctstctggatcagatagagcatggatgtggtyagccagtgatttctctgayggtgatgccaaactagagcrgttrgcagcaaaatttaaaacaccagagctggctgaagaattcaagcagaaatttgaggaatgccagcrgcttctgttagacataccacttcaaactccccataaacttgtagatactggcagagctgccaagttaatacagagagctgaagaaatgaagagtggactgaaagatttcaaaacatttttgacaaatgatcaaacaaaagtcrctgaggaagaaaataagggttcaggtacaggtgcggccggtgcctcagacacaacaataaaacccaatsctgaaaacactgggcccacattagaatgggataactrtgayttaagggaagatgctttggatgatagtgtcagtagtagctcagtacatgcttctccattggcaagtagccctgtgagaaaaaatcttttccrytttgrtragtcaacaacaggatytaacttcagttttaaatctgctttgagtcyatctaagtctcctgccaagttgaatcagagtgggacttcagttggcactgatgaagaatctgwtgttactcaagaagaagagagagatggacagtactttgaacctgttgttcctttacctgatctagttgaagtatccagtggtsaggaaaatgaamaagttgtttttagtcacakggcaraamtctacagatatgataaagatgttggtcaatggaaagaaaggggcattggtgatataaagattttacagaattatgataataagcaagttcgtatagtgatgagaagggaccaagtattaaaactttgtgccaatcacasaataactccagacatgastttgcaaaatatgaaagggacagaaagagtatggktgtggactgcatgtgattttgcagatggagaaagaaaagtagagcatttagctgttcgttttaaactacaggatgttgcagactcrtttaagaaaatttttgatgaagcaaaaacagcccaggaaaaagattctttgataacacctcatgtttctcggtcaagcactcccagagagtcaccatgtggcaaaattgctgtagctrtattagaagaaaycacaagagagaggacagatgttattcagggtgatgatgtagcagatgcarcttcagaagttgaagtgtctagcacatctgaaacaacamcaaaagcagtggtttctcctccaaagtttgtatttgkttcagagtctgttaaaagmatttttagtagtgaaaaatcaaamccatttgcattcggcaacagttcagccactgggtctttgtttrgatttagttttaatgcayctttgaaaagtaacrayagtgaaactagttcagtagcccagagtggatctgaaagcaaagtggaacctaaaaaatgtgaactgtcaaagaactctgatatcgaacagtcttcagatagcaaagtcaaaaatctctytgcttcctttccaayggaagaatcttcaatcaactayacatttaaaacaccagaaaagggtargtactttgttgttaaagttaagcacaatttttctttcttttaatgtttagcttgatgcagactctttgtrggatactaatgttgggatataaaygatgctttgtgaacacccccaaaatatttgagcaattttttttctcccttaataagttcacggtgaggtttcaaagagcaagagaacttagttwaagacatttcagtaactggaagatacttttatcatgctagggcagagcaaaagaactcggtacggtatacggactcatgcttgaatcatgcrcattaacgtgagtctttttttaaagtgttcattttcatttgttcagtttcttttgtcactcagaaaacatgatattgaggctgggcacggtggctcactcctagaatgccagcactttgggaggttgaggtgggcagatcacttgagctcaagagttcgagaccagcctggccarcatggtgaaaccctgtttctactgaaaatacaaaaatgagccgggcgtcgtggtgcgtgcctataattagcagctacttaggaggctgaggcaggaggatcacttgagcacaggagatggaggtagcagtgagctgaaatcatgccactgcactccagcctgactgagtgactgagactttgtctccaaaaaamaaaaaacaayrtgatattgagatgttctcattttatrtgttgtatgtcagtcttgctcatgtattaaakgagcaaagaatgaaactacagggataaatgaatatgtaagacartcagattggtggtataaattgagggattctggctttttatgttttaaaagcatattcattttgtttcctaaaatgttaaaaaaygaaatattctttattttctaggatttaattttagcctttttaaatctaatcccatrgccttttggactagcaccccttcctcacagcctgagagcaaaggtatagaactagcattctcagtatgagataacagcagtttttagcagctgggtagcccttagsaaagtattaatwactgtggctgtatgaaatgaagtacttaccactacaacatgmatgttaaagaatgccagtttaagcaaagtaccttttgactggtggcatgacacccttgttggtttgttttttaaaatgtastgggatgctgatttgtaatgtacttcattgctctgctatttcaggtctgctcartgaagacctatgttttatctaatgtttatstttagccactaacgtctgccagtattcamatgtagtggcaacggcatgtatacartatggaagagtgtccctgtmgggctgttcttttgtgcatggtttagaaaaatgttgtatttgaaaatggaccccrtttttaacagccagcattctacagcttgcatattatatatgttgcacmgatcawttttagaagtgtggctactagagtggaacaagaagtgggatctgttgaaggccttcaagaacaggttagggaagtgaaayctcacccttagtgaccagtaacacatcttagccatgccaaacaagtacaatgataaartarcaatctctgattttttttttaagtataccagttttattacyagctaaggtagctcttaatcttttatttttaaagatacggtctttgagaaatgtgaaaagtgttaacttaaaagtgratgtatacttgcgtacagtttctgtgagctctaggttargaatccctgasctaagarygaatgtgcctatatactactgtagaacatagagccttattytgttttgaatctgataatgtcattgtcccaagggaccttagaaatgaagactttagacatgagtaaactgwggccaagagaggctatctgatttacccaagrkgtctttactgagtaatagcagaagtggaacaagaatctgtatcttayggtgtactgttatttctcctagctagaaaatgatactargttttygtttataatgaaggagagggacaratttaacattgtaaaaggaagggcactggttctgcagagcagtgtcatccagtagaaataaaatatwacctgtgtatgtaatttaaaattgtcatttggtgcaatggctkgtgcctataatcccagttacttgggaggctgaggcagagggatcacttgagcccacaagttccaggctttagtgaactgtgatcacatcactgcactccagctctgggtgacaaagsaagactgcatctcaaataaataaatawmtaaataaattttctagtagccatattaaaaagaataaaaagaaacagttaaaaagggaaacagatgaaagtaactttatygatagatttgatttaacttatgtccaraatatcattttaacttctaattaatayaaaaattaaygatattttacattattgtttttcascaagtcttcaaaatccagtgtgtgtgtttacacttactgttagcaygtcttgatttggactagccaccttgtgaggttttaatagaatgtggctaggctaccatattggacaccatagctctcagaatgtttccctatcactagttggtatacatggcatgcttcatgactggcttgctttattaaactcctttagccagaagttcagaacaggttgcatatagaagttttttctctttctaattttttgccctttgcattgatggtggctggggatgggttgtttttagccatatgaatggtcttagattttatagtgttagctacctatagagtcacagttgttatttaattttacttagtatcatgcttgaacataggcaaactagatgcaactctagtcaccttccattcttggcaattgttaactttccttacagaaactaatcacagttggctttggattagtttcatatgtatagtaatacttgcctatgttttaagatttttttcaattgctgcaaatgcrtggatattttggtaaactattgtatgctaagtatagttaggcaacactttaaaatttttaacctttataaattctagaaatttatagtaattcttttcaatgactattaagtaaacacaaatttttttttgttttctttggttttaaatagattctgtgttcacttagggtttttggtagaamactaaatcaggatgctaattctagttcatgattatcatacatctctgcatcraagtatatgtgttttttatcagtatgctgttttaacctatagataggttccatggtttttattttcagttagagtattaacgtcaatacttaataccttatctttgtcaatttttttgactggtgttacagcaaaagagaagaaaaaacctgaagattctccctcagatgatgatgttctcattgtatatgaactaactccaaccgctgagcagaaagcccttgcaaccaaacttaaacttcctccaactttcttctgctacaagaatagaccagattatgttagtgaagaagaggaggatggtaaaacttttgttatttcaaaaatcctctgttcccgctaatcttagtaaaattgggagtatggtttaattattttaagcctgcctcttagaacttatcactaatatccttgcaggtagatatttaccctaaatgtatgtgtaaatggtcaatggatatagtgatcaaaaggactgcaatcattaagcaagcattttttggatggctaatgtgccaggcacgtgttttgaggggatttaaaataattataattttgctggagtcttaaagatgtggaagagagagagaaggcggacaaggttccagtggaaaactttgtatgcagtaacagtttttaagctggacagttaaataaaagtctcaatagaatcagttggacagtggtatatagtattgggttatgggacaaggagatcggaagatgaactaaaatgagagcagctcaaacaagatgagaggctgagctaaagctctagcagaaagagaggtattaaagatataaaattggctgcaattcaratgtggagagtgagaaatggtgaagttggaggtagtccctaagcaaggaaaaccccccaaaattaactagaaattcttttaatcaattgtattttaagatgaagatttcgaaacagctgtcaagaaacttaatggaaaaytatatttggatggctcagaaaaatgtagacccttggaagaaaatacagcaggtatgttaagtgtaaaggacatttataatgcttttaacaagtcttctatttagaaggaataacctagtctgataatttctataattwtcgattttacgatgcccatggtgatttaaaaaacttaaaactaacaggtgaaaatattcttttctgggtggtccttgtttttcattagtatgtacaggtcttgttacctgggtctgtggattatgttgatgactaccattgttgtagagaagttgggcttcatctaatttcgtttgcttgtgttgtactgatttttcagataatgagaaagaatgtattattgtttgggaaaagaaaccaacagttgaagagaaggcaaaagcagatacgttaaaacttccacctacatttttttgtggagtctgtagtgatactgatgaagacaatggaaatggggargactttcaatcagagcttcaaaaagttcaggaagctcaagtaagaacatctctaataaattttccttctagttccattgcctttgttgatgcagtaaactttagaatgttcttatttatttatttttgagacagaattttactcttgttgcccaggctggagtgcaatggcatgctcgtggctcaatgcagccttcatctcccaggttcaagtgaatctccttcctcagcctcccgagtagttgggattacaggtgcctgccaccacgcctggctaatttttgtatttttagtagagacgggatttcgccatgttgggccaggctggtctcgaactccggacctcaggtgatgcgcctgacctagaatgttcttaccaaataataataatgggttgtggctactaaatgggtttaagggtctagactaatcagctatggccaggaaagaaggaattttaattttgttctacacaggggctatatgccaaaagctacaaaacactgatgaaataaaaaatctaaattaatggaaaggtatatactgtttatggattggaaaactcaaaataactagaatatcaattttccgaaattgatctatagatttaacacaacaccagtcaaaacccctccaggaatttttttttttttkggggggggatggagtttcgctctgtcgccaggctggagtgcagtggggcgatctctgctcgctgcaacctctgcctcccaggttcaagtgattctcctgcctcagcctcccaagcagctgggactacaggcatgcgccaccacgcccagctaatttttgtatttttttagtagagacagggtttcaccatgttgaccaggatggtctcaatctcttgacctcgtgatccacccaccttggcctcccaaagtgctgggattacaggcgtgagccaccgcgcctggccaggaattctttatggatgtacacaagtgaattctaaaatttctatggtaagaaaagattgtatatttgttacagttgatgaatctacattgacacatcatcacctaatgtttttacctttttgtcaaaaatttttaactattgatacaatcgtgatttttattaaatctgtgaatgacattgcattttcaaatgttcagaaaactaactttgcattccagcgtaaacctcacttggtcatggtacaattttgttatgtggttgcattcaatttgcataaatcttgttataaatttttgggtttatatttatcaggatactagtagttttctgatactgtctttggtttccatgtaagagtaatgctggttgggctcagtgatatgtgtgtgtagtcccagctatttgggaggctgagtaggaggattgctcgggagtccaggagttccaggctgcagtgcgctatgattgtgcctgtgtatagccactgctctccagcctggacaacaacatagtgagaccgcctcttaaaaaaatggtaatactggtatcataaaatgaattgagaagtattttctgtattgctgttttctggaagagacttggttgttgacttggtgccattttccctttaaatgttgagcagtttttaccaatgaaaccacgtctggagttttcttaagttttaaaaaayactattgatttctcttctttattatttccttcttgccttggattttgcactttttttctagtttcttttttttttttttggcttttgagacagtctygctctgtctcccaggctggagtgcagtggcatgatctcagctcactgcaacctctgcctcctgggttcaagcaattctcatgtctcagccacccgagtatctgcgattataggcgtggctaatttttgtatttttagtagagacggggtttcaccatgttggtaaggctggtcttgaactcctgacttcaagtgttcctcctgacttggcctcccaaagtgctgggattgcaggcatgagccactgggcccggcctagtttcttaatttaaaaaaagcttaaattatgaatttaagatcattctttatttctagtataagtatttaattctataagtttccttctaagcacttcctagctgcaactggcaagttttaatatgtgatattttctctttcatgcagtttgaaatattttattttccttgagacgttctttttgatctgtacgttagatgctactgtgccatttccaaatatttggtgattttccttctgtatatcattctcttattgatttctagtttaattcctttatggtttatgaaaatattttgaataatttcagttctcttaaatgttgtgaggtctstcttggtgaatgtcttctgtgcacttgagaagaaagtagagtctctttttttgctgacattgtgccattggcagttccagtttttttgggctgctgtagcacccaggctgggttacaggagtggcagaaaaactccgtgtggatcttaacctccagattatctctctggtcccaagatccttattcttcctgtttttatccacctttctaaggcttcttagaggtgctctgtatgtttcagtgtaggcatttagttataggttttgaggagagatagggtgaagtgtgtttattctatcttctccagaagcccaagttctcaattccctttgaaatagattatataatctgttttgtaaattagcatttaagtggcatagtattttgtgacttcctctttgcagaaatctcagacagaagaaataactagcacaactgacagtgtatatacaggtgggactgaagtgatggtaccttctttctgtaaatctgaagaacctgattctattaccaaatccattagttcaccatctgtttcctctgaaactatggacaaacctgtagatttgtcaactagaaaggaaattgatacagattctacaagccaaggtaaatcttgatatatgtttatcatgtgttacataagggacaccttatatttgagaagatagacttttaaaggctgatcctgaaaactccctttaaaacacattttgatatgtataaaggggcatcttagtagtagtagtaataataaccagaaaaattatactgtgttgccaacaaataaacatgtttttattgatagagttgtggttattagggaatacaaagcattatgattctgacctattttcctgagtttaaaagacaatagtgttgttacatgtaatttcctttgtgatagtgttttcatttaaatattgtttgaattatattatcactcaagcatattcaragtgttttaattatgaaggaattgtagaaatattasggatttaagaaagttttatgrtactacttaaatgtttcttattttctctaatacttttaaagcttgttaaattaattattcagttacagtaacatatttggtattgctttctctctttttcatttcgattttggggatggaagtgggaagtttaagttgtattgctttgtgtaccttacctactttttaaaaatagccttcagtgtcacaaatattacatttataggcatttgagagtcttaatgtgctaaaagaggaagacgacttcatacctaaaacctcatacattttcatatgaggaaaataaggcatggggctttcagagatcatgcagcttcacattagcagaattaagagaagaccgcaaaagtccttatgacgaagtgtaaatgagacatttggtttttatgagcttatttatagtacagaacacaaaaagtttttatacagatgtttcctaaaaccctgcctttgactgaatgcttgctttagagtatagtaggctccatagagcagaaactgtagtttaatatctggcttaatatagatagctctccttctcatttataaaaaataatttttggcatgcatttggtgtagtattgtagtattctttgtgaatagcacctgtaaaattagtaatactgaagtagctcagaattggatgtattttgtaacttgacagaatttaaataactcccctcatcccagagtatacaagtctctactgttctctctaggtcctgggtaaagctttgatattcagcacaaattaaatagtaaattgttctttttttcttttgccaggggaaagcaagatagtttcatttggatttggaagtagcacagggctctcatttgcagacttggcttccagtaattctggagattttgcttttggttctaaaggtaagatcaagaggagagacttttaatgacattgttacagaatcaagcacaactgaaaaactagttttttgttgcagtttttagtttttagtttttagttgtttagtttttagtgttttaataatgaagggcttctacactttattttttgacgtcaatataatcttaagaattttctcttaattttatataagccatgctgatagtcctccccattctgaaatgcagaaccatttttgagctttggaatgactctgactttgatccttactcttttaactatactttcatatgtgatttgttaatatttcaggwtttgtgagtttatactttttaaggatatgattttgtagttttcttttttgtactatctttggatttcagtattagggttgtgctaatttattgtgctaagtttataattggtgtgcttgcccatcttctttagtggagtttctatttttaatccattttggtaacatttctagaaaagaatccatttccctgattgtatccggtttactagtgtaaggccatycattatattttttcattcttgtaatatctttcacattgctctttatagcaccccttaaatagttctagtacaaggtgtttgatttatggaatacattttattgaggatatgtgcttaaatgattaatgcagttcagaattctgttctttcctcctctatatttgcacttttttcacagctcctgccacctagaaacacataaaacttttagaaattaccttcagatgtgatgttatgttggaattcatggcttcactgatgtcgtttatttttaatttatgaaatagcctgaaatcaaagggtaatgtgtcagtaaataagcaatatagtaggtacacttacacaaaaaaaatcccaaaaaaatagataggctccttgttactcagtgtagcctctttgaagtattatgtcaatattggacactaaagtgaaaagtaggcagtactcacatatcgggaggaaaccatgcctaaataagccttatgcattaacattcacttctcactaccacttgtcatttttattcaccaagctcttgtgtattgaatgcttactttagttaatttagattgtgcttgttaaaaatagtatttgaaactgtaaatgccttgcagtcagttttgtttgtatccacaggttttcatagggaatctttatacttttgtaaatttccagataatttagagtttcaatcttattttctctaatgtctcaaagcttgccaaattaattattcacttacagtaacattactgtaggcccagttatgacctgtgagacccagatattgatatattacaaatacttttacaagtgggtgattctaatgtgttcccagggtagagaaccactattttgaaataattttgaattcttctgccacatgtcccttggggttattttttaaatttttgcttttggcaaaaaagttgctgaacaattttgtttttgtttttgagacaggatgtcactctgttgcccaggctggagtgcagtggcatgaacacagctcactgctgccttgacctcctgggctctaaagcaatccttccacctcagcttcccaagtagctgggaccacaggtgtgtaccaccatgcctagctaatttttacattttttgtagagacaggggtctcactatgttacccaggctggtctcaaactcctgggctcaagcagtcctgccaccttggccttgcacagtgctgggattgtaggcatgagccactgcacctggccctgaacagttatttttgagcccccaagttggtatctcatccagatcagtggttactgttctcaggaagttcccatgcaacctgtggcttttgttctcagatcattcctttgcaatatgtccttaagaatttttgtctttctgtctcttttttttgagacgatcattctgttgcccaggctggagtgcagtggmgcagatctcagtttactgcaacctctgcttgctaggttcaagtgatctcctgcctcagcctcctgagtagctgggattacaggcatgcactgcaacaccccgctaattcttttagtatttttagtagagatggggtttcgccatgttggccaggcttgtctcgaactcctgacctcaagtgaccagcccgcctcggcctcctaaagtgctgggattacaggcatgagccaccacacccggccctctctcctctttaaaaacatttttttttcccctccattaaatctgtctgaaagagagttgattttttattgtgttctttaaggtactgagttatgtatcctgtgacattttttctttttcatgagagtttttagcagaaggtgtagggttctttaagacagtgattcagcaagtgataaaaagttgagaggtgtttctttcctctaagatagtggggacttggtcatctaaattgaggtatgggatggagaagtttctagttttcaccttcttgcaggtatgcgagagtgagaccatcattgttcccccatacagaagtaggatgcttaacaatctaataccctttgggcagttgaagtcagtgagattctcccaaggctgctttccaccagcccaaccaagaaatctacattccagcattagcttcttcaggaagaagtagagatgcagaaattataaacatgtttaggccattgtggctaatttggaagtagcaggtttggcctgctgagctaagtttacaaaatttcaaggtgggtacttgaaattttagaagtaggtaaaaagaacctacttctttacttggaagtcyttgtgtagtttagtattaggaagtttatccaaggcagtgacagtcttatctttgtatcgctaagcataacaataataaatgtactctgtactcaayagtatgagttgaatttactagcttttttttttttcctttttttcctttttttttttggtgacagagtcttgctctgtcacccagrctggagtacaatggcacgatctctgctcattgcaacctccgcctcccaagttcaagcgattctcctgccttagcttcctgagtagctgggattacaggcacccgccaccacgcccggctaattttttttttttttttttttttaaagacagagtcttgctctgtcgtccaggctggagtgcagtggggcggtatctgatcactgcaacctctgcctctcaagttaaagtgattctcctgccccagcctcctgagtagctgggatcagtcacccatgaccacacactgctaacttttttttttttttttaaagacagaatcttgctctgttgcccaggctggagtgcagtggggcaatctcagctcactgcaacttctgccccccaggttgaagcgattcttctgcctcagcctctcaagtagctgggaccacaggcgcataccaccactcccggcttttcttttctttctttctttctttttttttttgagacggagtttcactcttgttgcccaggctggagtgcaatggtgccatcttggctcaccgcaacctccgcctcctgggttcaagcgattctcctgccccagcctcccgagtagctgggattacaggcatatgccaccatgcctggttaattttgtatttttagtagagacggggtttctccatgttggtcaggctggtcttgaactcctgacctcaggagatgcgctcacctcggcctcacaaagtgctgggattacaggcgtgagccactgcgcccagcctaatttttgtattattagtagagatggggtttcaccatgttggccaggctggtctcgaacccctgacctcaggtgacctcggcctcccaaagtgctgggattacaggcgtgaggaatttactagaataatataattttaaacatttaaaattgatgtacatattacatcatcaggaattagagggattgataaaataagagggggatgaaaaatgtaaaaaatagatactagtgtttaaatatcctgatttattcatcagataaaaatttccaatgggcaaatactggagcagctgtgtttggaacacagtcagtcggaacccagtcagccggtaaagttggtgaagatgaagatggtagtgatgaagaagtagttcataatgaagatatccattttgaaccaatagtgtcactaccagaggtaaatgttaaggaattaaccttttactaataacttatttttcatttttaagttttaccctggcttgatctgtcagggtataattgtttgcatttaagaatgtttactgtttgaaatggaagctctatttattagatgtctagcctttaagtataaattatctttttacagtttttacataaatattggtttgtaaattctatatgtaattattggtaagaaataattttttcttatgtttctagaatatcatgtttgtttttataacatgattctggggaaaaattaacctcatactcactaaagtcctttcaataaatgttaaccttgtatgttttttggacaagaacattgttctaggaaaattactttgtcattttttaacctcagtcagtagctaatatttctcttcagtagcaaacacttttgaaacctctctgtcctataaagaaaagcatttaatttccaaagggaaaatgaatattatataaaagaaaatgtttaatgataaatcaggtctttactccctcagccaaatcagatatattcctagccctaagatatataaccagttatcacattaacaaattctctttgtcatcacaaagaaaatgccttaaaagaatttggatctttgaaatttgtcatggaatttattataagcagcagcttatagagaatttcatctcctattataggtagaagtaaaatctggagaagaagatgaagaaattttgtttaaagagagagccaaactttatagatgggatcgggatgtcagtcagtggaaggagcgcggtgttggagatataaagattctttggcatacaatgaagaattattaccggatcctaatgagaagagaccaggtttttaaagtgtgtgcaaaccacgttattactaaaacaatggaattaaagcccttaaatgtttcaaataatgctttagtttggactgcctcagattatgctggtgagtttttacattcaaatgctacttttcattttttggacttttctaaaatctataacaaacaaaacaacttataacagttattttaatactaaggtcactgcttcccctttccctccctgccagatggagaagcaaaagtagaacagcttgcagtgagatttaaaactaaagaagtagctgattgtttcaagaaaacatttgaagaatgtcagcagaatttaatgaaactccagaaaggacatgtatcactggcagcagaattatcaaaggagaccaatcctgtggtgttttttgatgtttgtgcggacggtgaacctctagggcggataactatggaattattttcaaacattgttcctcggactgctgagaacttcagagcactatgcactggagagaaaggctttggtttcaagaattccatttttcacagagtaattccagattttgtttgccaagtaggtattattaagtacataccacaattgaggtcttgaagagtgcaccacactaatgggaaatttgagtgtttttccttgacctcatcctgtagttttgttaaagatttctttaggttttccacacatggaatcacatggcatcactacccattccctgctcctgcctaaaactttcaacctaaaataattgaggctgggcacaatgactcatacctgtaattccagcactttaggaggccaaggcaggcagattgcttgagccccggaatttgagaccagcctgggtaacatggcaaaaatctcgtctggacaaaaaaatacaaaaattagccaggtgtggtggtgtgcgtctgtgatcccagctacaaggaagctgaggtgggagcatccaggaggccaaggctgcagtgagctaggtttgcaccactgcactccatcctgggcgacagagtgagacagcctgtcattaaaaaaaaaaaaaaaaaaaaaaaaaaaaaatcaaattttcagtacttgagatctagtagaaactaagggatgggaaaaaccttttcatttttcatcttctttccaacaatatgaatttcttagttttcaaactatactcaggaaagctgggctttaggatttaacatgtagtgatgagttctgtgtgtattttaatattttactcaggattcctattaattgaaaaaaatttttaacttttttattataaatctttttttcagggaggagatatcaccaaacatgatggaacaggcggacagtccatttatggagacaaatttgaagatgaaaattttgatgtgaaacatactggtcctggtttactatccatggccaatcaaggccagaataccaataattctcaatttgttataacactgaagaaagcagaacatttggactttaagcatgtagtatttgggtttgttaaggatggcatggatactgtgaaaaagattgaatcatttggttctcccaaagggtctgtttgtcgaagaataactatcacagaatgtggacagatataaaatcattgttgttcatagaaaatttcatctgtataagcagttggattgaagcttagctattacaatttgatagttatgttcagcttttgaaaatggacgtttccgatttacaaatgtaaaattgcagcttatagctgttgtcactttttaatgtgttataattgaccttgcatggtgtgaaataaaagtttaaacactggtgtatttcaggtgtacttgtgtttatgtactcctgacgtattaaaatggaataatactaatcttgttaaaagcaatagacctcaaactattgaaggaatatgatatatgcaatttaattttaattccttttaagatatttggacttcctgcatggatatacttaccatttgaataaagggaccacaacttggataatttaattttaggtttgaaatatatttggtaatcttaactattggtgtactcatttatgcatagagactcgtttatgaatgggtagagccacagaacgtatagagttaaccaaagtgctcttctctagaatctttacacctcctgtgtggttacaagttaactttgtaagtagcgtaccttccttccttaaaatatctagcttcctgtgccctttcatagatattcgattaatttttacattttaaacaagttgactatttcctttaggggttttgtttcaaacttttctgtcatctgtctctactacctcagaaactgcagcttggttctgatgatagaaattgaatttttccttgtagttattgtgataaagtatgaatatttttagaaagtctataccatgttctttcgttaaagatttgctttatacaagattgttgcagtacctttttctggtaaattttgtagcagaaataaaatgacaattcctaagagccactgacatycaaaaaattcattacttacgcttcgggttcattctaaagtaaggaagacaatttaaaggcagtaaattcaaactgctgcataatttccagagctcctagtttctcaagtttgatacacaccaaaaacgtatttggaaatggcttgtatcaaatgttaggcaaattgctaaagaaaagaggatgttcttattggcctactcaatatggaactacaaagaatccaggtagaacacaaaattttgtatattgcaattatgaatattgactgtcttccacccatctgtgttctttcgggtgaaattacctcattttatttagtgaggaaagacaggtttattccctgttacatggggatttggaaattgggtatcctaaagcaagtaactgttcaaccaccagtcaaaagaggggagggatgttgtgcgagtaatgagtgatggtataccatcaccattccactcggccacaaagccagatacttgaaataaacctactccaaatgtatcagttcagtcttgaaccatggattacatatgtttacactaaatatttcaaattggcttatttggaaatctatgtaatataaactgatgtaaagtgtgttgtaacttttcagctgagacagttgatgccttcgtcatgattttagaataaattcttaagttaatgcaagtgctttttaagagactttttacagatttgtatgctttcctaaagcactaaagttacaaattaaaaagctttaaaaactttgaccaaaaatttgacaaaatgacatgtaaactgacttttcccgtattagtattccaaagatgcttaaaagtggcttgtggcatttatgagaaagtctttgtgtcacatttcaggaaaggactttgatttctctttgttatttaatcactgatgtggtctaaacccacgataatatgtatctttccttttaaactggattttatgttgtctcattaaaatctgcttaaagatagaataaaattcattatttgtacatcttaagtggtactttatggcaaaaagtatggcctaagtaattttcagataataactgctgaagtacagattttataaaacttgggcatttgggaactttaatccagagaatttaggagttgttagtccagagatgcagctgacagtcacaatttagaaagtaaaagattacaccactgtaattttatgaatgagaaaaatgaagtggttgtacagttcccctcagtcagttttgtttaacataggttttcaggttgatgtatactatgtactatggttagcactgttgtaggtattggcaaaagcttttttcttttcaaaaaaaaaaagttttttttccagggtgcttacattctaactattctttttaataccctgttataccccatatggaacacagggaaagtgaggtaatctgcaatgtctatgctcagctttcccttttttttttttttttttaactttaagagatgggagtcttgctatgttacccaagatagatgtaactctcaggctcaaagcaatgctcccgcctcagcctccttagcagccgggactacacgcgcgccaccactcccggctcagatatactcttggtttttcttttatatggcagttagcaaaggtcacttctgatggaacgaccggtctatgtggtgagcgcaacgcacaccaaacttaacaggttaaatggagctggagcggagcgctgcaggcaggtgcggggcctcggtgcccctcaacccgtggcacccaggcagccggggcaggactatcgcggggagatgcaatactactcagttacgaggtgtgtagtgctagcacgagaaacttsgaggacgcgcygacaagccgggctgcagtctccgggtcgccccgccccgccctttccctgccgccgtgcgtgcctcgggggggcggggtctggcacgtcgtgacgcactgcggccgcgtagcgccgcgggtttgatgaacgcggttcccggggagactggtacggttgctgtgtgctatggagccgagggtcgtcaagccaccggggcaggatttagtagtggagagtctcaaaagccgctacggactcgggggcagctgccccgacgaggtgaagccgccgcctgaggtccgcgggtgggctcctgctgctggggggcggcccgctccgtgccccgcgcagccggcctgggggcgcgcagcggctctggtcccggccccggcactcccgccgtggctgcggcttgggcctcgtggaagcaggcgggaggggcgggcgttgcgctgcgggggtgcgggggtgccgcttcacctatgcctctgtgttcctggtatactgggcatggtgtggtgttggagaaagtgctattcagcttttttttgcagtgatgtgagtggagttgtgaaaacaattgaattgctttttaaaagcggcttatttcgaaataatttcggacttactcaaaagttgctgcagtattaccaagaattcccttgtaccctcacttgcattcacaaattaatattttgccacattggctttaccattcgttctctccccttccctccctacaaacgcattttttccctttgaactatttgagggtgatttgcaggcatcatgcccctttacctctgaatagaaataacttgtgcatttttcctaagcataaggacgttgtcttttaataaccacagtaatattttcaggaaatttagaattggtataatatttggtaatctagagttcataagaaatttcagcaattatctcgataaaaccttttataggaaaattttttcctagtgcagatccgacccaagaacgagcattgattgtatttgattgtcctttttgttgcctttaatctggaacaggttcacagcctttgttttctgtaaggttgttttttttttgagaagtgtaagaattatttattggattgtttctccgtttgggtttatcttatagatgcttcttcgttagattgattatgcatttttggcaggagcatgagatgagtgatgtgtggcctgctgtggggaggaacatgacgttggtttgtcacattattgatgatattagttttgatcacttggttaagatggtgtctacaagatttctccactctaacctttgtaattaatacataatttgtggggaaatattttgagacagtaaattgatttttagtatacaaattaaatcttttctttttttttttagtatgatttttcaaatttttatcagtctaagtataagagaagaactctaacctccccaggtaagccggtattttgtatatttgggggtttcaaaaatttaatttgaggctgggcgcggtggctcacgcctgtaatcccagcactttgggaggccgaggcaggcgaatcacctgaggtcaggagttcgagaccactcaggccaacatagtgaaatcccgtctctactaaagatacaaaaaattagccgagcatggtggcgggcgcctgtaatcccaactgctgggaaggctgaggcaggagaatcggttgaacccgggaggcagaggttgcagtgagccgagatggcgccactacactccagcctgggcaacaagagcgaaactcagtctcaaaaaagaaaaaaataggctgcgcgcggtggctcacgcctgtaatcccagcactttgggaggcgaggcgggcggatcacgaggtcaggagatggagaccatcctagctaacacggtgaaaccccgtctctactaaaaaaaatacaaaaaattagccgggtgtggtggcgggctcctgtagtcccggctactcaggaggctgaggcaggagaatggggtgaacccgggagacggagcttgcagtgagccgagattgcgccactgcactccagcctgggtgacagagcgagactccgtctcaaagaaaaaaaaagaaaaaaaaatttgagagagaagattttaaaaatagtattatttagacttatggccagtgccagatattttgtgatatattgttgtggtaatctttcatggtttctttgtcgttgacaggtgatttggatatctactctggagataaagttggttcatcgttaaaatattctgatgaaagcaagcattgtagaacaccattgggcagcttattcaagcacgtaaatgtgaattggtaaagtaccctgaaactttactgttgctaccccctcagtatctcaaaaaactgagaaagagaaaagggcaggttatatttttgctctttcctgaggacaagtatgaggacaagtataaggcagtctggagcctgctaaatagttgaagcgagtcacttattaatttttactgagaatctctgtaataaaagcatagacctagcattatatttagtggcataatggaaagttatttatataatgtaaaagatgaaaaaatatatttttatggttattcattcaggacccaaatgaagactctgctccctttctttaaaaatttttttttagaaaaggaactatgggccaggtgcggtggctcatgcctgtaatcccagcactttgggaggccgaggcgggtggatcacctgaggtcaggagtttgagaccatcctggccaacatggtgaaatcccgtttctactaaaaaatagaaaaattagccaggcttggtggtgtgcgtctggaatctcagcgacttgagaggcagaggcaggagaatcacttgaacccgggaggtggaggttgcagtgagctaagattgtgccattgcactccagcctgggtgatgagcaaaactgtcctgaagaaagaaaaaacgaactacaaaaaaaactgccatacaggttttgttaggcagcagcattttactatctctggtgtgtctggtattgtatgcattgtatttaggtgattgagagagattgaagaaggtggtctggggagatggtaactacagggtatgtaggatacagtgctgggttaaaagaagttgccgttctgtaaggaagatactatttactatggggaaaaaatataaaaacagtggaagctaaggtaaaataaagatctaagttggatattatttaatgctaaaaatatgtggcagaaagaaatgctatgggtatcaagaaggagtaagcattttgaaataaagatgtatccatatataacatgaaatgttgaaataattgtggagagaaaaaataattatgcctaaagtatctgtatgttacataattagtatttgggagcttgactttttttaatacagttttctctttctctacttaaataagttaatctgtgtaacacactttgaacagttctgggtaaataataagtactcaaatgttacctattatcattattattactatttcatgttgcactcacaaaatctagttgatctagatttaggatttagacatgagctacgttgaatgtagggtaaggaaagtgaaaattgcttttaaggtaataattataaatttatggaaattattttctttttaactgagttttatcattttttatataatgacctgggtataactctaaactataatctaaaggttttggactatgaaggttttcataacattggacccctagttgtgatctggtctgaaactatgctgtccagcacagtagcaacaggccacatgtacctattgagtacttgaaatggggctggtctgaattgagatatgctgtaagtgtcatatacacactggctttctaagacttagcatagataacaaaaattagccgggcatggtggcgggtgcctgtagtcccagctactcgggaggctgagacaggagaattgcttggacccggaggcagaggttgcagtgagccgagatcgcgccactgcactgcaacctgggtgacagagtgagactccgtctcaaaaaataaataaataggcatggataaaataatgtaaaatatcttaattttgtgtgggtgtatgtgggtttgcagggggcgagcctgttgcccaggctgtgagtgcagtagcataattgtaactcactgtagcctccaactcctgggctcaaacgatcctctcacctcaggctcctgagtagctgggactacagacgtgcaccactactcccggctaatttattttatttatttttctttttgtagagacagagtctcactgtgttgtccaggctgatcttgaactcctgggctcaagagatactcccacttcggcctcccaaagtgctgagatcacaggcrtgagccaccatgcctgttctatcctaataatttttaacattgattacatgttgaaatgataaacttttagatatattatattaactaatatttttaaaatttatttttttaacgtgctactagaaaattttaaattacctatatgacttgtgttatattgcttttgaacaatactattccaaaaatttcaactcagattgtctttttggagacaacacctggaattctagttctgctccactttctactcgttatgtcacccatcagttatttgacttacttaggtttagtttacttatgtatattattttagctaaaactaccttatagataacagattattgggagtcaaaataaagtgttccttagctgtagaatataccacaggtaggtatatgtcattttaaattaagtctatttaatgtgtagaaaaagatgcttgtagtgggttatcaatgatcagtgactgttagtttttacgttttttctttttacatgtttacattttgcagtttaaaaaatgtttttacattttttctcagttatgctgttaatatttgaaaagcagttttatctttttaaagtgctatagtaaacttctagattgctgtgatacaattatttttttaaagcctagatgatgaactggattctttccatgatttgaagaaacaggaaacagaagaagagttaattgaaaatgattataaagttagtac

SEQ ID NO: 94419 - DNA, 13707 bp, Homo sapiens
  misc_feature (1)...(13707): n = A,T,C or G
acccaggaatggtgacgtgcacctgtagtcccagctacttgggaggctgagtcatgataattgcttgaacccaggagccagaggttgcagtgagctgagatggcaccactgcactccagcctgggcgacagagtgagattccatctaaaaaaaaaaaaaaaaaaaaaaaaaaagtaagcataatatttaagcaaagcttctgtatgttattgtcaatacagtaggaatcctcaagcttttggcatgagatattgttaattctttggatcctgagatacaagttggagagaaatgagaaaaaaatatgttcaaaaacaaactaaataaagcatgggaaagagtactgaaattatatacactacaattagtgctgagaattgcgaagagtgacaagggaaaggggcgggcaggggtggtggcagggggtggccaaaaggcttagaaatggcaactggtatggagatatactaggaagttccaatccactagtcagagacatctaccttaacagaatacaataggcaggaaggcctggaccaactcttagaatcatcagcaaaacacattataaaattcaactgatgagaatggcatgcaaataaatagcaaggatttttctaggtgatgggtatagggtagattcttgtactattaatagttgctagatgacgagttagtgggtgcagcgcaccagcacggcacatgtatacatatgtaactaacctgcacaatgtgcacatgtaccctaaaacttaaagtataataaaaaaaaatagtttctccacctttgtgtatgtttgaaatttttaatggaaagtaagtcttcttggaccaagtgaggcttaccctgggaatgcatggctggctcaacatttgaaaatcaatcagtgtaattcaccatcttaacagactaaaggagaaaaaccatatgatcatctctatatgcagaaaaagcacttgacaaaattcaacatccattcatgatgtttaaaaaaaccctcagcaaactagtaatagaaataacttaattaatctgataaatagtatttacaaaactctacaactaacacaatgctaactgtaaatgactgaatgtttcccccaaccatcgttcactctcaccactcccaatcaaaattgtaatgaaggtttgataatacaagggaaaaaaaaaagatatacagactacaaaggaataaataaaactatgtggccaggtgcagtggctcacacctgcaatcccagcactttaagaggccgaggtggacggatcactcaaggtctggagttcaagaccaccctggccaacacggcgaaaccccaactctactaaaaatacaaaaattagccaggtgtggtggcatgtgcctgtaatcccagctacttgggtgactgaggcatgagaattgcttgaacccaggaggtggacgttgcagtgagccaacattgtgccactgtactccagcctgggtcacagagtgagactatcttaaaaaaaaaaaaaaactatataccttgatgacataattacatagaaaatcccaagaaatgtacaaaaaagctaataggtttgataagtcagtttggctacgttccaggatacaaagtcaacatataaaaacctcataatgaacacctgaaattaaacttaaatttaaaatttaaaaacagtaccatttataacagcattcaaaaacataaagtacttaaatataaatctaacaaaatatgtacagaaactgcatgctgaaaactattgattcctgataaaagaaatcaaagaataccaacataaatagacatatactatgtgcatggattggaaaactcaatattggtaagatgttacttctgtccaaatggatctgtagaatcaacacaatctcaacgaaaatcccagcagatatttttgtagaaacttataaactgattctaaaatttatatggaaagtaaaagggcctagactaaccaaaacaattttgaaaaagaagaaattcaataacaacaaaacaaaaaacccaactaaaaatttggccaaagggtttaacacacatttcaccaaagaaggtatacaaatgcctaataaacacatgaaaagatgctcaatatcattagccattaaggaaatgagaattagtgatgtaatattacacacccattagaatgtctataatttaaaagactgacaatacaaattgttggagggaatgtggagaaaatggaacactttcaaagtggaacacaaacactgctggtgggaagataaaatggtatttccactgtggtaaatcatttggcagtgtatcacttaccaatgaggacaccacgtatgggctctgtcacaactattcaactctcttgtagtgaaaaaagggctgtacacaatacgtaaatgaatgagtgtggctgtgttctaataaaactgtatattactaaaactttacttacagacacaaaaatttgaatttcatgtgcttttcataagttcctaaatatttttttaatttttttcaatggtgtaaaaatgtaaaaggcattcttagcttatgagccatatgaaagcagttggcaaactgggtttggcctgcagatcaccattttccaatccctgccatatatgcatgaagtttcttatgataaccacaggtacttcatgcagtattcagaaggcttttttataacctgaactacatctttaaccacagtatatctagaatgctgttgatgctcaagtaatgttaaacaacaatagagtcttcaacttaaagccctagagtctgaaaaacaaacaaacaaaaaaccaataatagagtcttccttaggcatatcatacaaggtgtactagtaattttggctgggcatggtggctcacacctgtaatccccgcactctgggaggcccaggtgggaggatcacttgagtccaggagtttgagatcagcctggacaacatagtgagacccccatcgctacaaaaaataaattaaaaaattagctggcatgcagccgggcacagtggctcatgcctgtaatcccaacagtttggaaggctgaggtgggcagatcacctgaggtcaggagttcaagaccagcctgaccaacatggagaaaccctgtctctactaaaaatacaaaattagctgggagtgatggcgcatgcctgtaatcccagctactcggaaggctgaggcaggagaattgcttgaaccgggaggtggaggttgtggtgagctgagatcgtgccactgcactccagcctgggcagcaagagcaaaactccatcttaaaaaaaaaaaattagctagcatggtggtgcacgcctgtggtcctaggtacttgggaggccgagatgggaggattgcttgagcctgggaaatctaggctgcagtgagctgtgattttgccactgcaatgcagcctgggtgacagagcaagaccctgtctgaaaaaaaaactaaaaataaaaaccaaagtatactagtaattctctagacattttcccttcaagttttaattgcaaaataatcaccatgttataaaagaaaaagaaaaccctaacccatcccctgaaaacatacattttagttcagtatgagattcagagtaataaacagtatataaatactcatatacttataaaatataaatctataaatatacaaccacaatatcaagattccatgttcagatgtttttaaattgaaaatatatcttttttctttatgagaggaattaatgggtcaaagaaaacttatttagcttcaagataagaagtacaatagtttttattgccaaatgtgtcagtgtgtctgcttctatctcattgttagaagtaatttctagtagaattctcttcaatggcatttgacttcagtttccaaagagtaacttaccttaatgtgatgcacaccattcacttttccaatctgctgctcaatggtccaaacacaggaattgcaagtcataccctcaacagaaatggtaacagaattcacacccatacttggatccattttgatttcctcattacattcctgttagaaacaataaattcattaatttcagccatgcaaataatctttcctcaacttttcccccacctccccaattaaaaatatgctacattttatatatgctcaagtgtcatgtttaaaaaattaaaatgtgctagtaataaaatatggtaagcattcttcctgcttagaaaaaaaattcttatcaccttagatgaagtaaaggaaagttgtttctatggatatgctaactaaaaataaaaatttcaatactttaatacaagtaactagctttcatagagtgctttcctgattactaatgtttcccatacataatctcatttaacatttgtaagtacgaattaagaactaatcaaaaatgcctcaaatccttacaacagccaacaaggtcccacatgatttcccatgcctgtccccctcaagtttacctggcctcctcttctaccactcaccaaacccttctctgtgccagtcatactggcctcctggctgttacgcatgcaaggatgactcctacttcaaggccttattttagctattctcttgctttgggactttcttcttccagataactgcttggctaacttctttgtctccaagtctttgttcaaatctaaccttaatgaggactatgctgaccaccctatttaaaactgcaacctacatcccttccacacaaacatactctgattccccttacctctgctttttcttttgttttcatagaacgtaccaccttctaacatactccataacttgctgatttattctgtttattgcttattgtctgccttcctgtggtggttttaaaatacgcccacaaattctttgctactccttccttcaagaggtggaatttaatcctttccccttcggtgtggcctgaacttaatgacttgtttcttgttttttgttgttgttgttgttttggtttttgtttttgtttttgtttttgagactcaattctgtctcgcaggctggagtgctgtggcacgatctcagttcactgcaacttccgcctcccgggttgaagtgattctcctgcatcagcctccccagtacctgagattacgggcgcatgccaccacacccggctaattttttgtattttaagtagagacaaggtttcaccatgttgactaggctggtctcgaacacctgacctcaagtgatccacccgcctcgccctcccaaagtgctgggattacaggcatgagccaccacacctggcctaatgacttgtttctaatgaatagactacggtagaagcgacaaggtgtgacttccaagactaggtcataaaaaacattgcaagaggagaaaaaagcattgtgttttccttgttgtcctctctcctgaatcacgcaatctgggggaagccacctaccaagtatgaagacatacaagcagccttatggagaggttcatatggtgaggaactgaggcctcatgtcaaaaaccagcaaagacctaaggcctcccgccaatagccaggtaagtgaaccaccttggaaactgctccttcagacctaagttaagcctttaaactactacatccccagacaccatattgactacaacttcatgagacaccctgagccagaactacccatctaagctgctcccaaattattgagtcataggaaatgtgagataataaatgtttgttgctttaagccactaaattttggggttatttgttacactgcaataattaagtaatacacttcccactagaataaaaactccatgaagataggactctgttttttcactgatattaggctgaaccacatgaaatcatcatagtcaaacaccggcaatttcatataaatcaatctaatatatcccatggaaacagtggttcctctggtgaggggaaatgagtggttagggaataagggtgggaaaaagaattttcagcgtataaccttttgtaccttttacttcaaatggtataaaaagtattgcagcccaccgccatggccgcctacaaactggtgctgatccggcacggcragagcacatggaacctggagaaccgcttcagctgctggtacgacgccgatctgagcccggcgggccacgaggaggcgaagcgcggcgggcaggcgctacgagatgctggctatgagtttgacatctgcctcacctcagtgcagaagagagtgatccggaccctctggacagtgctagatgccattgatcagatgtggctgccagtggtgaggacttggcrcctcaatgagcrgcactatgggggtctaaccggtctcaataaagcagaaactgctgcaaagcatggtgaggcccaggtgaagatctggaggcgctcctatgatgtcccaccacctccgatggagcccgaccatcctttctacagcaacatcagtaaggatcgcaggtatgcagacctcacagaagatcagctaccctcctatgagagtccgaaggatactattgccagagctctgcccttctggaatgaagaaatagttccccagatcaaggaggggaaacgtgtactgattgcagcccatggcaacagcctccagggcattgccaagcatgtggagggtctctctgaagaggctatcatggagctgaacctgccgactggtattcccatcgtctatgaattggacaagaacttgaagcctatcaagcccatgcagtttctgggggatgaagagacggtgtgcaaagccatagaagctgtggctgcccagggcaaggccaagaagtgaaggccagcggggaggatactgtccccaggagcaccctccctgctggtcttgtccctctgcccctcccacctgcacatgtcacactgaccacatctgtagacatcttgagttgtagctgcagatggggaccagtggctcccattttcattttagccattttgtcgcctgcacccactcccttcatacaatctagtcagaatagcagttctagagcacaggttctcagtctaagctgtggaaaagctccccttatccaacagagtttaaaagtagtgacttgggtttttgtgagtgctttgtttactaaggactttggggaggaacatgctaagccacgaccaatgaggagaagcaacagagcctgtctgtccccatgagcagagtctgtcctctgctcttctgcagtcaggccactgcctgggggctctagtcattccagtggaagatgaatgtaatctgcatggtgatgtgacaactgtttcctccttgaccccagaggatctggctctaggttgggatcaatcctgaatttcgttatgtgttatatttacttttattaaaaaagtatagtatatattaataatacaaaacaataacccttctggggtttcttgtggcggttgaaatagtcccacatgtggtcatcagaaaataagccattcctcataccaatataggatcagctccttgacctctgaggggcaggagtgcttcctggtgtgtgtattagaatcccttcctgccttgtttcatggcagtgaaatgcctcttggtcctgtccaagtgtgtctttcactgatttctgaatcatgttctagttgcttgaccctgccacatgggcccagtgttcatctgagcataactgtactaaatccttttaccagatcagtataataaaggagtgatgtgcaattaaaaaaaaaaagtattacaacatcattttagttttggtgagctcagagaaacttaagcagaaaatgctgaaccatgcccgctgctactaacaaagcaagatgattaatggactcttgtaacttctccaactaatttctgtggagctttgaacaattagaccacccagtctatggtattatgttatggaagcctgaactaagacatatgcattcttttttaaattgggatataattcacatgctataaaattcagccttttaacctacagaatgggagaaaacattttgcaatctacccatctgacaaaggtctaatatccagaatctacaaggaacttaaacaatttacaagaaaaaaacaaccccatcaaaaagtgggcaaaggatatgaatagacatttctcaaaagaagacatttatgcggccaacaaacatatgaaaaaaagctcaacatcacagatcatcagagaaatgcaaatcaaaaccacaatgagataccatctcacaccagtcagaatagcaattattaaaaactcaggaaacaatagatgctggtgaggctgtggggaaataggaacgcttttacactgttggtgggaatgtgaattagttcaactattgtggaagacagtatggcgattcctcgaggatctagaaccagaaataccatttgacccagcaaccccattactgggtacatacccagaggaatataaatcattctactataaagacacatgcacacgtatgtttactgcagcactatttacaatagcaaagacttggaaccaacccaaatgcccatcaatgatagactggagaaagaaaatgtggtacatatacaccatggaatactatgcagccatacaaaggaatgagatcatgtcctttgcagggatatgaatgaagctggaaaccatcatcctcagcagactaacacaggaacagagaaccaaatgctgcatgttcttgttcataaatgggagttgaacaatgagaacacatggacacagggaggggaacatcacacaccggagcctgctggggggtgaggggtgaggggaggaaacttaaaggatgggtcaatagatgcagcaaaccaccatagcacacatgtacctacgtaacaaacctgcacgttctgcacatctatcctggttttttttagaagaaatgaaaaaaattcagccttttaaggtatccagttcagtactttttagtacattcacaaggatgtgcaaccataatgactatgtagttgcaaaacattttcattactccaaaaagaaatcccatgtccattagcaacactccccatttcctctctactcacagcccctggcaaacactaattttatttcctatctctacggatttgcctatacggccatttcatataaattgattcattcaatatgtgtccttgtgtgtctggattctttcacttagcataatgttttcaaggtacattgatgtgtaaaatgtatcggtattccattcttttcactttcttgatggtgtccattgaatcacaaaagcttttaatttgtgaagtccaatttatcttttttcttttgtgttttttgtgtcatatctaagaaaccattgccacattcaaacttacgaatatttactgctatgttttcttctaagagtttttgtagttttggctcttatatttaggtctttaatccattttgagttaattgttgtacatggtgtatggtaaggatctgacatacattgttttacatgtggatgtcctgttttcccaacaccagttttaaaacattcttgagatgtagttcacgtattatataattcgcacatttaaagtgtagaattcaatagttgttagcatattcacagacatgtgcaaccatcaccacaggcaatttcagaacattttcatcacctaaaaacaacaacaacaacaacaaaacataccccttacctatcagtcatcacctcctaagccttctgtcnnnnnnnnnnnnnnnnnnnnnnnnnnnnnnnnnnnnnnnnnaaatcatgtaatatgtggtcttttgtgactgacttctttcatgtagcatgttttcagtgttcatccatgttacagcacatatcagtacatcattcccttttatggctgaataatattccactgcatagatacaccataatttatctatttgtcagttgatgaacatttgggttgtttccatcttttggctattatgaataatgctgctataaacattcatgtacaaacttttgtgttttcatttctctttggtaatacctaagagtagacttgctgggtcatataataactctatgtttaattgtttgaggatctgccagactgttttccaaagtgactgtaccatttatactcccatgagcagtatataagggccccaattgttccacctccgatacctattatcttttttattctacccatcctagcaggtgtgaagtggtatctcattgtggttttgattcacatttctctgattactgatgatgtcaagcatcttttcatgtgcttattgggtatttgtatatcttcgaagaaatgtctattcaagcactctacccaatttttaataaggttattttgttgttgttgttgagttgtaagagttctttatattcttggatattaatcccttatcagatatatgactttcaaatactttctcctatccagttggttgtctttcactctttttttttgaaataaaatttgcttttaataaaaatttattttgtacatttttaaaattgcaattttcaggacatgtaagaaaaatatttttcctcatactgaaataagcatatctttggtatagaaatcacaccctgtgtgtgatcttttaacttaaaaaaaaaaaagtccagtgcttttacattgttggcgggagtgtaaattagttcaaccattgtggaagacagtgtgatgattcctcaaggatctagaactagaaataccatttgacccagtaatcccattacaggatatatacccgaaggattataaatcattctactataaagacacatgcacatgtatgtttattgaggcactattcacaatagcaaagacttggaaccaacctaaatgtccatcaataacagactggataaagaaaatgtggcacatatacaccatggaatactccgcagccataaaaaaggatgagttcatgtcctttgcagggacatggatgaagctggaaacaataattctcagcaaactatcacatgaacagaaaaccaaacactgcatgttctcactcgtaagtgggatttgaacaatgagaacacacagacataaggagggaagcatcacacactggggcctgtcggggggtggggattaggcgagggataacattaggagaaatacctaatgtaggtgatgggttgatgggtgcagcaaaccaccatggcacgtgtatacctatgtaacaaaactgcatgttctgcacatgtaccccagaacttaaagtataaaaaaaaaagtccagaactagacctaatatgctaaacaaaactattctttggccatccatctgcagcctttcaatgcaccattgtggagcttcagaatatcattctgtacacatcaccatatctacaaagaattaagatgtcatatcaaagatatccagaagttatatatggtacagaattagttggcttaatcattcacacataatacaaactaccaaaaagcgacataagatacagaacaaataaaataggacattgtcactaaggtcaaataatataaaaacaatcatgttatttaaatttgatgtattggaagcaaagtaacttagagttatgtaaataacttgtaaagctccaaaattcatagtacagagccataaatctgataaggcactttaaagacagcaatcaaacatataaaaataccgaaaacaaaaaatattaagtgtaaaagtagtaaccatagaaataaataggaaaaaaaattcgttctttctagacagtctttcattttctgaaataaagacttcttagctgggtgcagtggctcacgcctgtaatcccagcactttgggaggccgaggcgggtggatcacttgaggtcaggagttcgagaccagcctggtcaatatggtgaaaccttgtctctactaaaaatacaaaaaattagccgggtatggtggcacacgcctgtaatcccagctactagggaggctgaggcaggagaatcacttgaacccaggaggcagagattgcagtgagccaagatcgcaccactgcactccagcctgggagacagaatgagactctgtctcaaaaaaaaaagactttttaaaataatcatttgaggacaaaagtatttatcatgtttttaaaagctatcatcaaagttaaaatctctgtgaaaaagataacattttccttcaagtcaacaaagtcctgattcatacatttttagagaaacaattatagtcttcctgctaaatacaggaagaaaaaatagctttgtattatgttaatcaactcttcttttcaataaacatttagtgaatgctatgtgacactgttttaggtgctggggatatcgaagtaagtaagacaatcatttgcctagagaactcagcctaatggagctggaaccttaaagttatctcccttggtccataagatgaagctcaacttctaattctgccatgcttggcatcttactgcaaaacaaataatggtccacttagtttgctactggtagcactgtggcacaattaatattaactatctactgataaaattaaattttgtaaaggattttatgaaagtttgaagggcagaaagtgtaagaataaacaagtactgatcaacatcaaaaatagaatcagtattctgcttttacaaaggtcaagaaaaccaagaaaaacttcattctgaagatatagagaactgctagatattatcctatatatgtggcacatgtgaaatgatcaaatatgaggaagtatgaattattacacagtcactatcaaagagctaagtatgccaaatcaattgtcaggtttccaagaatcacagcattctttcaagaggtcccgtcatgttttaaggaaacgtgcattttccgtacatttgacggcaagctcttccacttgagctgatactgtagatatggcttcaagaagtttggttgacgaaaatgctgtgtctctgatctgcagccccacttcctccagcaggtctactgttccgctgctgctcctgctcaaaacgggccggcctaaactcacagcaatgcccagggaagatgctgaagaagggtctgaaaatgagggagaagagagaggaagtagggctgtgaagaaactcataacacctcagggtcagccacagggaagggctggtgttaacagtggagggtgtccaggttcttggcgtcttaaacaaagaattggacaaaacgcacaaacaaagcaaggaaggaatggagggatttgttgaaaatgaaagtacactccacagtatgggagcaggcctgagcacaggggctcaaaaggccctcttacagagtttttttgagtttaaataccctctacttggagtacaccctatgtaaaaggagaggatgaagtaaagttacaaaatcatttacttggcctatgctctatgagaggatatttcctgtcatagctgaagtgtgaatcagccttatgttcctgcctctagaccctattttccagcctcactgggacggcagaatccgaccagagcagccaaaccatctttcaaccgcttgtacccaaatcctccattctcttgatagtgtccttttgtgtacaagttttcaagtctgaagaagtccaattttactattcaggaccctcacaaggttcacacattgcatttggttttatgtctcttttgtctcatttaatctagaatagctccttccatatctcttttcccccatgaagtgactttttgaaggtcagttgtcttaacatccagtgtatcttcttt

SEQ ID NO: 94420 - DNA, 43387 bp, Homo sapiens
  misc_feature (1)...(43387): n = A,T,C or G
ggtgcgaagcgtggccaggagcaggtgcacagtgagggcatggtgcccaccccagcacggaggacgagccagggccacactgagcagaaaggagagttacgggccaggagacaagcacagaacgaggacgaggatgtaaaagaagtgtgggtgggaaaaaccaagaaagaagaaagtgacaaattaggtagtggcacaaaagtgggacaggaggccttggtttccagaaaagaaaagaagagggagacagacaaagctggggaagaggggactcgaaaaccaaagaaatgaaaagctcaggacctggaggaagacagagaagtgcagtgtgggagtgagctggacggggcaccacagccagcggcgtggcctcgccattgccctggggcaaagggtgactgggaggtggggggcctggtgaagaagccccaagaagagaaagctcagggcagccrgaagccagccagaagcagagagaagtggaaggagggggagccagttgatgctggggtgtccagagggagagaagaaagatggccaggaggcagctaagccacaggaggagagccagaaagggtgggagaaggccgaaggcagcaggtggaaatggtgtgtaccctaccccaccccttctctccctccatgtcctgacggggtggtgggaatgctgtgtagaccagtgctgggagggggggaatgctgtgcagaccggtgctgggaggggggaatgctgtgtagaccagtgctgggagtgtgggaatgctgtgtagaccagtgctgggagggggggaatgctgtgtagaccagtgctgggagtgggggaatgctgtgtagaccagtgctgggagtgggggaatgctgtgtagaccagtgctgggagtgggggaatgctgtgtagaccagtgctgggacgggggaatgctgtgtagaccagtgctgggagtggggtaatgctgtgtagaccagtgctgggacggggggaatgctgtgtagaccagtgctgggagtgggggaatgctgtgtagaccagtgctgggacggggggaatgctgtgtagaccagtgctggcaggggtggaatgctgtgtagatcagcgctgggagcaggggaatgcagtttagaccagcacaggcccacttcccctccctgtccctggtgggggaggcggggagtgctgtgtagaccagtgctgggaatgtgggaatgctacagtgctggcctttgcctgcccactgtaggttgccagggagcctgggtgccccccagagtgccctcttgcatcggcagctttgagctgtgggttgtagggtactgggagcagccagcagtaagtgagtgtttgctgtgtgtctggcattgcttttggtcagtcctctatgaagtaggtactgctatgtccatttttcagatgaggaaactgaggtacaaaaaggttaagtaaccgggccaaggtcacatggccacaagtgggccacactgcagttgtagccgtcacccctgctgtgtcctgtacgcagccacgagctgcgcagctctcccagtggagacgtgctgggggtgtgatacgcacgcctgctttgagaagaacgatgcataccatcgcattagcatattatgttgaatgacagtattttggttgaaatagttgaaattaagtatattgttaaggtcaaagtcactgtttcttttgcagtgtggcttctggatggggtaaactccaccactgctcgcagctgtgtctgctgggcggcgccgcctcccacctgggcagtccctgcatagccttggagctccggcttctgggtgggaaacgtctttataggtatcagctcctgcattcagcacctgtttgattctggggaaattctttaaattttctaagcctagtttctctcatgcaaaacaggggtcctcctacctgctgtgaggaagagtgcgtgaagccctgtccccgctcccttgggcaacccctgagtggcctggggaagaagagggcacaaggggaggaggccgccaaccccaggaatattggcagacagttcatagaaaccccttctggtctgcaggcccagactccccaactgtgtctctggccttgtgcagtgggtgccacttttccacrccctccccagcatgttgactgcagccacccaggtgtgaggtgacctcactgtgggttggatttgcatttctcccatggctgatgattttgagcatctttttacaggattgttggccttttatatctcatctttggagaaatgtctatttagattatttatccccctttttaaaattaacatttttttttttttgagacggagtctcattttgttgcccaggctggagtgcaatggtgcgatctcagctcaccacagcctccacctcccgggttcaagtgattctcctgtttcagcctcccgagtagctgggattacaggcatgagccaccacgcctagctaattttgaatttttagtagagacggggtttctccatgttggtcaggctggtcctgaactcccgacctcaggtgatccgcccgccttggcctcccaaagtgctgagattacaggcgtgagccaccaagcccagccaaaaaaaaaatttttttttaagagatggagcctgttgttcaggctggagtgcagtagcctgatcatagctcactgcagtcttgaactcctgggttcaagcaatcctcccactcagccccctgagtagctaggactactgtagcaggacacgttgcagacaaaacctctcggacaccggttttagggaataagaggttttaatcagctgggagcatcagtagaatcgcctctcaagatccgggctccccgaggtccagattcctgtcccttttaagggcttacaactctaaggggtccatgtgaaagggccgtgatacattgtgcaagtgggggctacgtaactggggccgcatgcaccggtgatcagaacagaaccaaacagggagttacgcaatgcttcctcataagaagtctggaatctgtaggtaacagaagcgattaggtccgggccgatctttaactaccaggcctggggtgtggcgccgggctgtttgactattgaatttcacttctgccttttctttaactcctactttttcttttctttgaggcagaaattaggcagaagacaatatgagaggtggtctcctcccttactacaggtgtacaccatcatgcctggctaatttaaaaatctttagtacagatggggtcttgctgtgttccctgggccagttttgaagttttgaaatcagcaagtatgaatcctccaactttgttattctttttcaaacattgttttggctattctgggtcccttgtatttccctgtgaattttaggatcaggttgtcaatttctgtaaaaacgccagctggaatttagatggggattgtattgagtttttggatcagtttggggagtattgccgtctttttttttgagacggagtcttgctctgttgcccacgctggagtgtagtagcgtgatctcggctcactgcaagctctgcctcctgggttcacgccattctcctgcctcagcctcccaaatagctgggactacaggcgcctgctatcatgccgggctaatttttttagtagagacgttttagccaggatggtctcgatctgacctcgtgatccgcccgtctcggcctcccaaagtgctgggattacaggcgtgagccactgcacctggccaatgctgtcttaaccatatgaaatcatccagtccgtgaacatgggatggctgctcatttatttaggctgtctttaatttctttgggcaatgttttacagttttcagagtataagcttgatacttcctttgttaaatttattgtgcagtattttattttttcatgctataataaattattttcttaatttcattttcagtttgcgtatggctactggttagaaatacaactgatgtttgcatattgatcttgtaccctacaattgtgctgaattcatctattagctctactagtttttgtggattcttttttaaattttattttccatagagatagggtctcactatgttgcccaggctggtcttgaactccttggctcaagtgatccacttgctttgacctcccaaagtgcttggattacaggcatgagctacggtgctcggccaatttttgtggattctttgggattttctatatacaagattatgccacctgcaaatagacataatttacttctttctttctgatctgggtgtcttatttcatctgcttgcctgtttgctcagttagagcctctggtaccatgttgagaggcagtggtgagagtggacatcctcgtcttattcttcatttcagcaggagcgtccagtctttcttctggcatatgaggttagctgcggggttttgtagatgctgcttttcaggttaagtttctttctattctgttcttgagtgggttttccattctgtttatcatgaaatggtgctggatttgtctgctgctttttctgcatctattgagaaatcttagggtttttgtcctgccacactccctcttacaaaacctgaggaaccaactgggcatcggctcacacctgaaatcccagcactttgggaggccaaggtacttgagcccaggagttcgagaccagccggggcaacatagggagaccccatctctacaaaaagtaaaaaacaaaaaatcaaaaacccttagaaacctgaactggaaaacacattgacctcaggattccgttgaaggaatggtgggcctgggccaaggccctcttctggtttgtagaaagggttacctgaaaaaatatgcatcactgttccgcagcccctgggaggaggtggcccacctggagagtcagctgctgtgtcctggtgtgtgtgtaccttcagctgctgagctgctcattctgaawtgatgggacacctaccaggtctgcctgggccctaagagcgagcaattgcagccctcggcctctgcccatggcttccagcagctagatgacatggacactgagtcagttggtggcaggggagggtcgctgagggcgtgcggtggcagcccggactcctttcctgcctgtgtccactgcattccccccaacggtcacagtgaaagtgcggaatgcatgtgaattcatctgcttcccacggtcctggtgtcagggttttaccggggaagaccaaggctgcggtgctgccagaggtgagcggtgtggcctgttgtggctcagggcctaccgccaagtgctgatctagaggttttgccccttggccatgctccccagtgaagacactggggttaaaccctggtcagggtcagcagtcacgctggggactgagcgcaggaaggaggctccagctgtgcctggtctctggtctccttgggagtgagaggctggttggcagggatgatttcgcaggacttcctgtgacctttgtccagaggcaccacctctgaggggctgctgtgggctggacagcaggtgcttctgccggtttctgcgtcctggaagtgctgctgtttgtaggggatgaggtagggggccatctgagcctgtgaggtcccttctccagagcagcagagcgtgtacttaggaaggacctgctaggtgcccctgccctcagaggctctgggagagagctgtgtgcaagccctgggcaggagttcactggcctggtcgtgtgacctgtggggcatcctgacagccagccctgtgctgcagaggtcagtgggactgggtttggatctgggtccccgcccagcgtgaaggggcgctggaccacgaaggcagggaaaccagggggaggccggcaggacagtcagtggtcctgctgccgcagccccgtgcaggcttagaccgcccagccttgggatgagcgccgctgggggcggaggccgcgctcgggggcggggctggccgctgggggcggggcggggctggccgctggggcggggcccagcttgtcgcyctttcccggaggctggcagatgcgcgtggtgcggctgctgcggctccgggcggctctgacgctgctcggggaggtcccccgccgcccggcctcccggggtgtcccgggctcgcgcaggacgcagaagggcagtggagccaggtaaggtgkcccagtgagcaggcggcgagggccctgagcaccgggcttgggtaggtccagaaaggggagtggcaggcctcgtgggacggccttgccctgcttccggttttcccaaaagtcgggccaggagagcatgcgtgccgcggtgtgaccggcccgcctcctgcccggggtgtacaggcccccccatgacgtcgcccttgcttccccaggcaccaccccaccaaccctatttggggaaatctcccctctttttttccgcttgtggtttcatcatttgtgtagctgtgcctgggcctcaacactgtagggtttggttaggtactttataaaaagcttatgttgctgtgcatggtcttctgagacccgctctttcctggagtcggttcccgggttgtctccaggaccgattctgcatggcggcgggcgctcacygtcatatctacatcaccaggcacaagccrcatggatccagtggccctggtggccgttggtggtcccaggcgctttcctggaggacatgtgagaagccctgccggcgcatactgggcctggggtagccgcatggggatgggtctctgcgcatgaaatgctggagtttccgaagagctggagagttgacagcctcactggtgcgtgggagatcctgcaggagttcccgccaggtctcgcggttwatcatcattcacttagtgcttccagcgtggcatgtctctgtgacctggtggtgcgctatcagcatacccattcacagctgagggcctgcacagctgcctaaggccatgctgcagaaatgtcytgtctgcctgcaggagcttgggacccaaagagagccccagatggggcagggtgtcttgggaggagggagttctggcctgygcttggagctggggctggctgtgggccctgcattgaggcacatctctccgagggtgcacaggcaggtaggtgctttccaaaaagtgctgctgagctgcagtcgcccagstggacaggtgggtttggagcaaggtctctggctttgaaagccagcttgtgtctgatggtggtgcttggtgccctggtctctgcaggggtgaaagaatgtcactacaatgtgcagccctcagttgggcttgagcgcacacccagtggtgcagccctgcctggccgctggccggcaggttgtttcacctcagtgtcttcatctgtgaaatgagactggtgatgtgactaccctagaggctttgtgaaggacttggcagtcagggtcactgtcagttctttatttttatttttattattattatttgagacaaaatcttgccctgtcacccaggctggagtgcagtggtgcaatttcaactcactgcaacctctgcctcctgggttcaagtgattctcctgcttcagcctccttgagtagctgggattacaggcacccgccaccacgcctagctaatttttgtatttttagtagagacgggggttttgccatgttggccaggcgggtctcgaactcctggcctcaagtgatccgcccrcctcggcctcccaaagtgctggtattacaggcgtgagtcaccgcgcctggctcctatcagttagttccgagatacacgtggtttcccattttctcacacccgacatgatccatcttcccttattctctaagaaggcgttgtctaggtttgcatccttcagggcacttagtggtgcagcctcctaccagccccaccctagacatgctgtatcagggctggtgggctctcttgaactcctaaaacctgtaagaaaggtgaggctggtctcacctgacgtggaaaagctctgcagagtcagcagaacccccctctccccgagtctccctccagactccagctgcctgcagcatctgccagctagtttttttgtactttcgccatgttggccaggctggccttgagctcctgagcctgcctcagcctcccaaagtgctgggatcacaggcgtgagccaccacgcccggctccaccctggaaggttcttgagcccgttaacttctccctactttatcagctccgtctctacgtcttctaaccttgcccattccctcctctgcagaaacagccagaaaggccctttcagaaatgtctgttgcacatgctttcccctctcagacccttcagagacttcctgttgctctgaggacactcatcccagccgaccaggcccaccaggcccccaacagcactacctggctggggtcacrtgcaggtctcctggctctggcaggtgggggtgtgatctggaaccttctgtccttgtgcgtctgrgggaggctcagaaggtgtgcccatctcactctcccccatcctgatggtgctcccaccctctcgccaaagcctctcccactgaggcctttgcactggccatcctgggtgctggacttgctcttcccgcagccctgctgaccgagcctgcccactgcctgccagccacgccccatctcrctcctcttctcccaggcccatctcagaatctaggttcagttgagcccttcgtatgggttttggtgatctgcatccgcaggacccagcgcagtgctggttcagggcaggcttgggcttgcctcaatggatagatgatgactggcctggagagttaggatgggctgtagccgccacgctggctgtgtccccccaccccctccaacacccccccaayctccagagctgggcttgccagaagggggcgccctggggagggggaccttggcagggagccctgtggagcctcaytgtgttagtgccttacaaaaggagcccttccctgaaaacccctgaggmttctggcttcagggcctcccctccctgccccgcctcctccaccccgccctgcctcttccacccttccaccctgcccgatcctytgtgggcggcggtcctgcgccctgctgtggtgcctctccactggctgcactgctggacccccttccacccagctcctcggaggcagggctctctcataagcagccaggtcctttatttagcaaatgaaatggtcccatggagaggttcccgaagattctagaccggctctgaagggacccatctggggagaggccctagagcctgggagaggcacgttgcctttcccacttagctgggcttgccctttcccgcttagctgggyttggtgggatccgtgactcagcagcacacgggcctctgcaggtggggggcatgggcgggtacacgggcatggggtctgaggtcaggtagggttgcctccctctgcaggccttgttttcctcccycgtgaggtggaggccacactgctcacctgctaggagccacagggaggagccactgtgggagcggggaagaggctcatgcagggcctggcccaggagagtgacacgtcctgtctccgtctttaggtgggagaaggagaagcacgaagacggggtgaagtggagacagctggagcacaagggcccgtacttcgcacccccatacgagccccttcccgayggagtgcgtttcttctatgaaggtaaggatgcagggagcggctcctccccagcctgcgcttggttccctgggcgtgggctcccagtgggcatctggctcgctccctcagcccccctgcaggcttctggctatgagcgctctgtgccctcttcttgcaggtgatgcgtgggggctgctgaccaactgacccatgctcagagggtggcagttcgggggctcccgtccctgcctttcctgctgagcctgcactggctgtgcctgttgtgtccaggaccctctgggcaaagcggaccccccctccctccccccgcaccactgtgttccctgtgtgttctgagtatacacagtacgtacactgcgtgtacacacatggatcacagaacggtcacttgaccccagcttgtgattctcagcaagaagcggagcccgtggttgacatgagcgctgagccaccctcagaggcaggacccgggggctctggggcagcagggcccacacacccctcctgcccttgagccctcctctctaccccagggcccaggagctttggcttggctcttgtgctgctgattttagctgcttcagcctattttcttcatctctgctagaaggcatccttctaagaaaagcaaacctcttctyccccagggcaggcccccacgccatgctgtgcccctcccaccagccctcccgtgggccccctgccgagtcacatgcacacctgagtttgctgagctcctttgatgcaatgttttgttcaaagcctgtttctccaaagcggtactggagcttccacagggacagaggttctagctgtgtctgtgggggctgcccacgggaggccatgggaccttactgagcgtctcgcgctgtgcccctggcctggtgtagcggctgcctcgcctgccccacagcagccctgcaggacctccctggccaggagggacatggcaggcgaggactgcttatgcagggccatggtggacagtccggggagtggtggtgtcgcgtggggcccagtggggccgagcctccacagaggggcagtgggagctgagcccctcgggcctgtgctgctggtctctgggcctctcgtcctctgtcctgagaagctagtttggggaaggattgctgctgtttatcagaaatgccttcctccttcttaccaaatgattatgcatttatttctctaaaattttcttatgaaagcttttcagacgtgcagttgaaagaattcctggtgaacaccctcgttcccaccacgagcctctcactctgctcgcctgctcccagctcaccccccatctctaaaccacactgatcttagaataaaatgcagggaatggtgggacagaggccgcagagttgtaaaagggtacacctagttattcagttttctgctttgaagccttaacttttattttacttgtgaaattttgtggaaattggtgtgttttaaaattgtacatgttccattttcatgtaatataaatgtagtagcaacgttaagtggtaaaggaggagaaagcagtagcgcctgaaatcttctgcagctttctcacgacccgctccmagatcactgtggtcgccacctccacgcaggttgattgtcgtgtgtcatgcagaacatgcttctgaacttacagaakaaggcctrgcttcttgctcttggcatagtacgcacgaaagcgtagtttaaagcaatgaggtcatgtcagctggaggccgagcctctggccgctctctcatacgatgtgtcttccgatgcctgcaggaaggcctgtgagattgagcgtggcagcggaggaggtcgccactttttatgggaggatgttagatcatgaatacacaacaaaggaggttttccggaagaacttcttcaatgactggcgaaaggtaggtaccctgggcggccgccacagctgtcctggacctggctggctaggcgtctgcggttctgcagtgctgcctctgaacgcccctcgcaagttctcggtggcccctgtgtgaccactcacaggtgccgtcatggctctttgcagcttcgagctcctgggctcaagccatcctcctgtctcggcctcctgagtagctgggaccataggcggtgccagtgtgtccagcctagtgcacctcagacctttcccttcccaggcaggctgtggatgtggaggccgatttgtggtccttactccatggaccgctgaaaggacaggggtctggcatataagaaggagagtagaggaggccgcatgccatttcccagcccccaggaagacatgcttggcgagaagctctttggaggggagggtgctgcctcaaggctttttccttgctcattttcaaggtgactgcccttcgcccatggcctgactgattttatgtgtgtgccgcggaytctgtgccctccggggtttctgtctgccccacacctgcgaggctcgcccctgactgcttgtcccgcagcatcttcctggctctggccgggtcgcgtttcctctgttccgtgactcatgctagtccatttccctattcgtgggtgtttgattaattcctgttttaggcctttgcatgtgtaaagctgccatgaacattcccacgtgggtgagggcacataygtgtgagttgcctctgacaggacttggggtgaaattgctgggtcacgtrtgtccagcttactagcaacaccaggctgaactgtccacacgcctgccgcgggtgcgaggcacctttctagtgggcacaaaatgacacctcgccgtgggtgtggtttgcgtttccctaatgacaagtgatattaagcatcttttggtgtactgacgtgtcatttcagtattttctttcgtgaacttttgtctatttaaaaaactgagttgcttgcgtattcctcgctcatttatcggagttttaaaaacgcatcctgggtgcaggttctttgccagacgcacatgctgtgaatgtcatctcccagactttgccttttcacttctcagtgaggtctccaaacagaaaactgtaacttagttatgccgtttatcaatctgtcttttatggtgagtacttttgtgtcctgttttaagtccattatcagaaatatgatttgcaaaaatctttcatggtgtttgtagtttctatttgcgttctcttaacaatgtctttggaaggtcaggagtttggaatactgatgaggtcccacgtttcatgttttgtcacaggtttgcttttgttgttttgtctaagaaatctgctgaattcggcagcacagagatttcctcctatgtttttcctagaagttttggttttaggtttccattgaggtcagcttggtttaggtggaactctgagttaattttggttatagtgtggggtagaggccgaggctcgtgtgttgcatgtgggtgtctgactgccccgagccagctgctggagcctgtgcttccttgtcccctgtgcaggctccgcttctggaccctcttcctttgtcctgatgccacccctctgcctttcacgacagctttgtgaggtggcaccagctgcccggcatcctcattctccctctggtcagcacttcttccagtcactagcagagctaggaagggaggcagtgtcacaaagcagcagaacaggagtgggtggcacatccggcggccccgggagacacagggacggaccctgagcccgtggttgtggccgagcagggctccatcctggcacagatggtgtcgtacctgagctcctcggaagaggcggatcatccccatcccacagcgagacacgtttgacagcagctcctgaggtctcacaggcctaagtggccgagcctggactgggaccgtgagctggtgcccgcaagcctgggcttttgtccatgggctgtgcagagtttttgttgtgtaggaaacgaaaggagaaacagttgcctgtgatctgcggctctccctcaggtcagtgtctcctgttcccgcgtcctggcttttcctgggcactagttttcgtgtgagtgtgatcagtgtgcctgtaatgttttccccacttagcattttatcccgcttagtctccacacgggtagatcatcgtcaaactgttttctgctgtgctttccaaaattcaccttgaaactgaatccccagcaccacaggacagagggagggcctttaggagctgattgggctgtgaggactccaccttgctgcagcccttaggattaatttagggccttagggcagggctgggtggaattagctgggccccttctgtccttctgtcccctccactgtgtgaggacagccttcagggcatcctctcagaagcagggactgggccctccatagacgtcaaatgctgggaccctgatcccagccttccagcccccagagctgtgactatgatttacaactgaccagtccccggtattttgtggcagcagcacgtatggactgagactttgccctcgcgaatcccgtcacgttcaccaratgagctcccgaccatgtatcctgctctgtccggtcatgrcgtttctgcagttgcccttagtgcggtcgtcatccgggttttcatactggagagtttatttaggatggatctcaaagtggaattattgggtgcaaaggttttagccagttttactactgayttgttgtgaagttgcttttggagaactgtgccctccgctgccccacccaactccatgcctgcaataacagaaccagctctatctgtggggtctgcggggagaggctctatttacggggccgcaggaccgtgcgcaggttctgcctattgcacacacgcctccgtyggacatggcgagagcgcgtttctgtccgtcagacatggcgagagcgctctgcatgtctgtccttcagacatggtgagagcgcgtgtctgtggtttttgcaggaaatggcggtggaagagagggaagtcatcaagagcctggacaagtgtgacttcacggagatccacagatactttgtggacaaggccgcagcccggaaagtcctgagcagggaggagaagcaggttgggctgcctcgagcgttgtgtgacctgaagtggcccctgggaacgagaggccggcctggcccaaagactgagaaaggcctgtggccttagagaagccccttctcacaaagctgctcttttctygtcagccttagcgcccctgcatgtgcttaagtgtcgttccgcttccccagagcacatttgagagtaaacccggtttgaaatggataatttaccatcattgatcaagggtgggttcccagacgggccgtgggctgagggcggggcttgtgcaggccagtcgrcttcttgctgttctgtgccatgcgtctccctacatctaacaggaacctgccgtgctgtgatctccatgtggccttctcagggattcccttagccctcctcctccatggcgggcagccacgctccctccacctggctttactgcttaggcctaaaacagccgaagtctgtgcaggggccggggagtccaggccatggggtggttaggccatggctctcggtgccccctgcaagcccacctgcactgtcccctgcccctgcaacctccatggattgtgaagggctttgagggtccagctgagttagccagacagagcagggtggtcccgggttagcaacaacggactgaggcctgttctcttctcttcactgctaatgtccactgactgttttattaactcagaagctaaaagaagaggcagaaaaacttcagcaagagttcggctactgtattttagatggtcaccaagaaaaaataggcaacttcaagattgagccgcctggcttgttccgtggccgtggcgaccatcccaagatggggatgctgaagagaaggatcacgccagaggatgtggttatcaactgcagcaggtgcgtggccgggcgggcagcaggcgggcactggacccccgccacccgggtgaggctggcttttcttcacctcctgggagagggaggcacaccgagaaacatgtggttggtgacccccacaccattcctgtggagctcagcctgtaggcgtggccgggcaagggcggccttcccagggtgcttcccacggggtcggaagtcctcgccttgctatggctgagactttctcccgccaaggacacctccatgtggttttcatatcccacaccatctggatggcccagtagcattaggtgttttgaacttattggagggacattccaagtggtggagaggggactgctgggccacgtgttgtactgtgtgaccacagggtggagtagggaccctgcctgcaggacccccagtggccaggctgtgtggggcagggcactcgtcgtcccagttggtgctgagaggtctgtgcagagcggtgccttgcttgggtggccgcccagcctcctggtgyactgtggccttcctgtgtgtgcagagggtagattgagtggctgcttttgtctgagctgccaggcaggccacctctgatgccrgactcggtcaggagccatgccaccaccatagccaccacrtgggayggttgaccagagcagctccttttgcttgcattccagagaataaggtctccaagttatgtttgggtcgttgttctgctgcagggactcgaagatccccgagccgccggcggggcaccagtggaaggaggtgcgctccgataacaccgtcacgtggctggcagcttggaccgagagcrttcagaactccatcaagtacatcatgctgaacccttgctcgaagctgaaggtgagcgcagggcttggcagggtgtttyctccccaggaggtccccctgaggacgccggcagggaggtgtgtaagcygggcaccggcagaggcttctgagatgggctgggagtcggccagcccgtgctgaggtcatgctgtgccagcaggcacaagccccaaagccaggagtgggcatgggtgctcactgccggcatcacccagctagatttgctgccccagcccctgaccacggcaccactgagtggagaagcacgaggtttgggggagggagagttgacagcctcctccgttatttaacaggaatgtgaatgttttctttcctgttattttcttcgtttagggggagacagcttggcagaagtttgaaacagctcgacgcctgcggggatttgtggacgagatccgctcccagtaccgggctgactggaagtctcgggaaatgaagacgagacagcgggcggtggccctgtatttcatcgataaggtatgcggccttctcgcttcctggcggctcttcatcctggttctcctggcgaggactcccagttggatggtgcagtgtggcgacgtgggcctgtgtgtggggtggaacctcattctgatggggggggtgtgtgcatgtgcacacgtgtgtgggtgtgaacatgtgtgtagggtgtgcatgtgcattgtgtggtgtgtgtgcacttgtgcgtgtggtgtgcctatgtgtggcatgttctgtgtgtggggcgtgcatgtgtgtggnnnnnnnnnnnnnnnnnnnnnnnnnnnnnnnnnnnnnnnnnnnnnnnnnnnnnnnnnnnnnnnnnnnnnnnnnnnnnnnnnnnnnnnnnnnnnnnnnnnnnnnnnnnnnnnnnnnnnnnnnnnnnnnnnnnnnnnnnnnnnnnnnnnnnnnnnnnnnnnnnnnnnnnnnnnnnnnnnnnnnnnnnnnnnnnnnnnnnnnnnnnnnnnnnnnnnnnnnnnnnnnnnnnnnnnnnnnnnnnnnnnnnnnnnnnnnnnnnnnnnnnnnnnnnnnnnnnnnnnnnnnnnnnnnnnnnnnnnnnnnnnnnnnnnnnnnnnnnnnnnnnnnnnnnnnnnnnnnnnnnnnnnnnnnnnnnnnnnnnnnnnnnnnnnnnnnnnnnnnnnnnnnnnnnnnnnnnnnnnnnnnnnnnnnnnnnnnnnnnnnnnnnnnnnnnnnnnnnnnnnnnnnnnnnnnnnnnnnnnnnnnnnnnnnnnnnnnnnnnnnnnnnnnnnnnnnnnnnnnnnnnnnnnnnnnnnnnnnnnnnnnnnnnnnnnnnnnnnnnnnnnnnnnnnnnnnnnnnnnnnnnnnnnnnnnnnnnnnnnnnnnnnnnnnnnnnnnnnnnnnnnnnnnnnnnnnnnnnnnnnnnnnnnnnnnnnnnnnnnnnnnnnnnnnnnnnnnnnnnnnnnnnnnnnnnnnnnnnnnnnnnnnnnnnnnnnnnnnnnnnnnnnnnnnnnnnnnnnnnnnnnnnnnnnnnnnnnnnnnnnnnnnnnnnnnnnnnnnnnnnnnnnnnnnnnnnnnnnnnnnnnnnnnnnnnnnnnnnnnnnnnnnnnnnnnnnnnnnnnnnnnnnnnnnnnnnnnnnnnnnnnnnnnnnnnnnnnnnnnnnnnnnnnnnnnnnnnnnnnnnnnnnnnnnnnnnnnnnnnnnnnnnnnnnnnnnnnnnnnnnnnnnnnnnnnnnnnnnnnnnnnnnnnnnnnnnnnnnnnnnnnnnnnnnnnnnnnnnnnnnnnnnnnnnnnnnnnnnnnnnnnnnnnnnnnnnnnnnnnnnnnnnnnnnnnnnnnnnnnnnnnnnnnnnnnnnnnnnnnnnnnnnnnnnnnnnnnnnnnnnnnnnnnnnnnnnnnnnnnnnnnnnnnnnnnnnnnnnnnnnnnnnnnnnnnnnnnnnnnnnnnnnnnnnnnnnnnnnnnnnnnnnnnnnnnnnnnnnnnnnnnnnnnnnnnnnnnnnnnnnnnnnnnnnnnnnnnnnnnnnnnnnnnnnnnnnnnnnnnnnnnnnnnnnnnnnnnnnnnnnnnnnnnnnnnnnnnnnnnnnnnnnnnnnnnnnnnnnnnnnnnnnnnnnnnnnnnnnnnnnnnnnnnnnnnnnnnnnnnnnnnnnnnnnnnnnnnnnnnnnnnnnnnnnnnnnnnnnnnnnnnnnnnnnnnnnnnnnnnnnnnnnnnnnnnnnnnnnnnnnnnnnnnnnnnnnnnnnnnnnnnnnnnnnnnnnnnnnnnnnnnnnnnnnnnnnnnnnnnnnnnnnnnnnnnnnnnnnnnnnnnnnnnnnnnnnnnnnnnnnnnnnnnnnnnnnnnnnnnnnnnnnnnnnnnnnnnnnnnnnnnnnnnnnnnnnnnnnnnnnnnnnnnnnnnnnntgcgtgtgtggcgtgcgtgtgtggtgtgcgtgtgtggcgtgtgtgtgtgacgtgccctgtgtggcatgcatgtgtgtggcctgcatgtgtgtggcgtgcatgtgtgtggcgtgtctgtgtgtttggcgtacgtgtgtgtggcgtgcatctttggcgtgcctgtgtggcgtgcctgttgtgtggcgtgcctgtgtgtgtggcgtgcgtgtggcgtgcctgtgtggcgtgcctgtgtggcatgcctgtgtgtggcgtgcgtgtggtgtgcatgtgtgtggcgtgcgtgtgtggtgagcatgtgtggcgtgcgtgtgtggcgtgcctgtgtgtgtggcgtgcgtgtgtggcgtgcctgtgtgtgtggcatgcatctgtatggcgtgcctgtgggtgtggcgtgcatgtgtgtggcgtgcatgtgtgtggcgtgcgtgtggtgagcatgtgtgtggcgtgcgtgtgtggcgtgcatgtgtgtggcgtgcatgtgtgtggtgtgcctgtgtgtggcatgcctgtgtgtggcgtgcgtgtggcatgcgtgtgtggcgtgcgtgtggcgtgcctgtgtgtgtggcgtgcatgtgtggcgtgcgtgtttggcatgcctgtgtggcgtgcgtgtgtggcgtgcctgtgtgtgtggcatgcatctgtatggcgtgcctgtgggtgtggcgtgcatgtgtgtggcgtgcgtgtggtgagcatgtgtgtggcgtgcgtgtgtggcatgcgtgtggcgtgcgtgtgtggcatgcgtgtggcgtgcatgtgcctgtgtgtgtgtggcgtgcctgtgtgtggcgtgcgtgtggtgtgcgtgtggcatgcgtgtgtggcgtgcgtgtggcgtgcgtgtggcgtgcgtgtgtggcgtgcatgtgtgtggcgtgcctgtgtgtgtggcgtgcctgtgtgtggtgtgcctgtgtgtgtggcatgcatgtgtggcgtgcgtgtttggcatgcctgtgtgtggcgtgcgtgtgtggcgtgcctgtgtgtggcgtgcatgtgtgtggcatgcctgtgtgtggcgtgcgtgtgtggcgtgcgtgtgtggcgtgcgtgtgtggtgtgcgtgtggcattcgtgtgtgtggcgtttgtgtggcgttcgtgtgtggcgtgcgtgtgtgnnnnnnnnnnnnnnnnnnnnnnnnnnnnnnnnnnnnnnnnnnnnnnnnnnnnnnnnnnnnnnnnnnnnnnnnnnnnnnnnnnnnnnnnnnnnnnnnnnnnnnnnnnnnnnnnnnnnnnnnnnnnnnnnnnnnnnnnnnnnnnnnnnnnnnnnnnnnnnnnnnnnnnnnnnnnnnnnnnnnnnnnnnnnnnnnnnnnnnnnnnnnnnnnnnnnnnnnnnnnnnnnnnnnnnnnnnnnnnnnnnnnnnnnnnnnnnnnnnnnnnnnnnnnnnnnnnnnnnnnnnnnnnnnnnnnnnnnnnnnnnnnnnnnnnnnnnnnnnnnnnnnnnnnnnnnnnnnnnnnnnnnnnnnnnnnnnnnnnnnnnnnnnnnnnnnnnnnnnnnnnnnnnnnnnnnnnnnnnnnnnnnnnnnnnnnnnnnnnnnnnnnnnnnnnnnnnnnnnnnnnnnnnnnnnnnnnnnnnnnnnnnnnnnnnnnnnnnnnnnnnnnnnnnnnnnnnnnnnnnnnnnnnnnnnnnnnnnnnnnnnnnnnnnnnnnnnnnnnnnnnnnnnnnnnnnnnnnnnnnnnnnnnnnnnnnnnnnnnnnnnnnnnnnnnnnnnnnnnnnnnnnnnnnnnnnnnnnnnnnnnnnnnnnnnnnnnnnnnnnnnnnnnnnnnnnnnnnnnnnnnnnnnnnnnnnnnnnnnnnnnnnnnnnnnnnnnnnnnnnnnnnnnnnnnnnnnnnnnnnnnnnnnnnnnnnnnnnnnnnnnnnnnnnnnnnnnnnnnnnnnnnnnnnnnnnnnnnnnnnnnnnnnnnnnnnnnnnnnnnnnnnnnnnnnnnnnnnnnnnnnnnnnnnnnnnnnnnnnnnnnnnnnnnnnnnnnnnnnnnnnnnnnnnnnnnnnnnnnnnnnnnnnnnnnnnnnnnnnnnnnnnnnnnnnnnnnnnnnnnnnnnnnnnnnnnnnnnnnnnnnnnnnnnnnnnnnnnnnnnnnnnnnnnnnnnnnnnnnnnnnnnnnnnnnnnnnnnnnnnnnnnnnnnnnnnnnnnnnnnnnnnnnnnnnnnnnnnnnnnnnnnnnnnnnnnnnnnnnnnnnnnnnnnnnnnnnnnnnnnnnnnnnnnnnnnnnnnnnnnnnnnnnnnnnnnnnnnnnnnnnnnnnnnnnnnnnnnnnnnnnnnnnnnnnnnnnnnnnnnnnnnnnnnnnnnnnnnnnnnnnnnnnnnnnnnnnnnnnnnnnnnnnnnnnnnnnnnnnnnnnnnnnnnnnnnnnnnnnnnnnnnnnnnnnnnnnnnnnnnnnnnnnnnnnnnnnnnnnnnnnnnnnnnnnnnnnnnnnnnnnnnnnnnnnnnnnnnnnnnnnnnnnnnnnnnnnnnnnnnnnnnnnnnnnnnnnnnnnnnnnnnnnnnnnnnnnnnnnnnnnnnnnnnnnnnnnnnnnnnnnnnnnnnnnnnnnnnnnnnnnnnnnnnnnnnnnnnnnnnnnnnnnnnnnnnnnnnnnnnnnnnnnnnnnnnnnnnnnnnnnnnnnnnnnnnnnnnnnnnnnnnnnnnnnnnnnnnnnnnnnnnnnnnnnnnnnnnnnnnnnnnnnnnnnnnnnnnnnnnnnnnnnnnnnnnnnnnnnnnnnnnnnnnnnnnnnnnnnnnnnnnnnnnnnnnnnnnnnnnnnnnnnnnnnnnnnnnnnnnnnnnnnnnnnnnnnnnnnnnnnnnnnnnnnnnnnnnnnnnnnnnnnnnnnnnnnnnnnnnnnnnnnnnnnnnnnnnnnnnnnnnnnnnnnnnnnnnnnnnnnnnnnnnnnnnnnnnnnnnnnnnnnnnnnnnnnnnnnnnnnnnnnnnnnnnnnnnnnnnnnnnnnnnnnnnnnnnnnnnnnnnnnnnnnnnnnnnnnnnnnnnnnnnnnnnnnnnnnnnnnnnnnnnnnnnnnnnnnnnnnnnnnnnnnnnnnnnnnnnnnnnnnnnnnnnnnnnnnnnnnnnnnnnnnnnnnnnnnnnnnnnnnnnnnnnnnnnnnnnnnnnnnnnnnnnnnnnnnnnnnnnnnnnnnnnnnnnnnnnnnnnnnnnnnnnnnnnnnnnnnnnnnnnnnnnnnnnnnnnnnnnnnnnnnnnnnnnnnnnnnnnnnnnnnnnnnnnnnnnnnnnnnnnnnnnnnnnnnnnnnnnnnnnnnnnnnnnnnnnnnnnnnnnnnnnnnnnnnnnnnnnnnnnnnnnnnnnnnnnnnnnnnnnnnnnnnnnnnnnnnnnnnnnnnnnnnnnnnnnnnnnnnnnnnnnnnnnnnnnnnnnnnnnnnnnnnnnnnnnnnnnnnnnnnnnnnnnnnnnnnnnnnnnnnnnnnnnnnnnnnnnnnnnnnnnnnnnnnnnnncttccagagtgctggcattacaggcatgagccactgtggctggctgagaccgttctaaaaaaaaaaaaaaggttacattctgaggttctggtgaggatatgaatttcgggaacacttttcaccccagtacacctgggaggggctgccctctttcctctgctgcagggactagtggctgcccaccacccccacagcccctagctccaccagcatcgatgcccagagggatgagtgtggtcgggaagggctgggtagatctctggtctccagactggcttgaaggaagactggaacctggggagcatcctcacctttgaatggctgtcctgaagagtcacggtgtcccctgtctgggtgggcgccacgtcgcagtgacgttggacagatccacgcacgaactccctgcacctcaaaagcacaaatgtgactcaggctgggcgcaaggcccacacctgtagtccagacaccttgggagggctaggtgggagggttgctggagcccaggagttggaggcggcagtgagctatgattgtgccactgcactccagcccaagtgacagagccagacctagtctctaaaaattaaaaaaaaaataaaaaaattaatgtgacccaaccgtgggatggagtggagccgttgaaaaacagaaatggaagtttggggacaggtgttgagggcagcagagaaacaggagtccctggcagggcccggcctcaggcagtctggtcgggaagtcattcctaaggaatgaattaatcggaggtaggagacagaagccaacacacgaaaggaagaggcaaggaggtgctcaccacagtgcccctgccgtggtgaagcatcggctgtggtgcaggcctggatggggagttgcactctgtccagacagaggactagccagccatttgcagtgctgtccaggggagcactcggtaacggaatgcatgtgatgtagagaaaaaggcgggacataaagcctcgtcaagatcagcggtgtgaaaccaaacgtgtagaggaagatragggaagaagccagaagtcgggagctgtgggctggggcttcccgccgtgtcccggtgcctgtgggtttgtagaatggggttcatcagccatggtgccaggctgatgagggggccagttgggggtgcggggcctcctgcccgtgtctggtgagggagggctgccatgctggtgctggagagagcaacacagaggccacagcaacctccgccctggagccgatgcccagcgctcagggagggtgcctgccacttgtaggaggaccagcaggtgaaactgaggggagggcaggcatgggtgcaggtgcaggctggcgtttcctcggagcagggttggtctttccagaagggaattaatgtcctctccccaaagggactggtggagggaggttggacacaggaaccccgaaggccctgaggtcctgtgatgtcagatgagtgtctcacattacaagggtgtgggctcacctggtggaaatccggcattgatggaagaaggagccggggactctgggccacctgccgcggtcacccagggggtttgcagggcaggagtcacgcccacctcctgagcacgctgcctgtgcgtgtggtagcggtgactgccacactggagggtgggggccgtgtcacgggaggatgccgacaggtgacggtgatgctgctcgggccaccttcctcagggaagcctcccgtgggctcccaggctctgcgtagaygcccttcaggtcctcactggattcgggttttttctgtcctctgaaattccttctttctccttcaggtgtacaagaacttacagctctttatggagaacaaggacccccgggaygacctcttcgacaggctgaccgtaagccrgctcgtgtttcctcagcagtgggcggcggcaggacccagtgagagggcgtgggcgctgagtctggcccagggttttgtcctgacccaacgrctgacatgtcctttccttcccgcrggaggctgggacggccccgcaaaaccacrtaattatagagaccattttcctccccagacgaccagcctgaacaagcacctccaggagctgatggacgggctgacggccaaggtgttccggacctacaacgcctccatcactctgcaggagcagctgcgggccctgacgcgcggtgagcmkgccccacacccacactcagcgcgggggagcacggcccctgccccagaccgggctccccggctggcccttgttgagtgagcctcggggtggggccgcttctttgggaaatgggctgaggttgtgggctggctgcttggcagcctaggtggccagagtcctggggaggaggagggaggttctggctctcgggaccccaggcatcccagccacgttctccctgcggggcggcccctactgctgagccctactcaggccccatggcctggtggtgttcctcagctcctcctcagggttctttcttgaaggcccaggaggcctctgcactttccagtggttctgtccctcccaccctcagctgtctgagcaccccgacctctgggcctctgtccacggccctgtctcagcttcagggccctctgctctttgtcccctgccatcaacctggggatgcygtctaagcttggygagggcctctcctccctctgtccctggcgctgcccctgctccgtgatgtccgggctgctctgtgatgtccgggcagattggatgcacagactgtccagagggtgcctcccaccccggcgcccaccgcactccccaagcagggcttcctggaggaggcgccgaggctgggtgctcaggggcgctgacgctcggcatgtgtttcgcgtgcacccgtgggcctcagaggccggtgctgtgctgccctggggacaaccttggagctggggcagcamtggggctgtgggatgcrgaggagctagctggcatccaggtgagagccccaggagaggagacgccccctccactgagggaggcagaagattctgggtgagggcataggggccgaggccgggcctgggagaggaaatgaaggtgctgggcccactgtggacgtgcttccagagctgggtgggccatgcaggatgggcgtgaaggagtggccgctccagtaggtgccttggggccagtgcttacgttctctgaacctcattcttgactggaaaatggagacaacgtggtaccttgaggggatgtcgccaggggaagccgggtgctggggacttgtgacaggcagggacccacagactcgccaggggaagccgggtgctggggacttgtgacaggcagggacccacagactcgccaggggaagccgggtgctggggacttgtgacaggcagactcgcccgtccaggcggctgggcctcctccttgccatggggcctgggaaggcccgggtggtgctacctgtgctgtggccccacgtgaagccttgttgctgtggttaaagacgctgggccctgctctcgaggccaccttggagggtcactgacccttggccctcactctccccatcccagtgggtgcctgtgtgagtrgaaggggctgcgctgtgtggcgcgttaaggccggctcagggcagacagggagggtggccggccccgtgggtgctgcctctgacagcccgtgcctctcagccgaggacagcatagcagctaagatcttatcctacaaccgagccaaccgagtcgtggccattctctgcaaccatcagcgagcaacccccagtacgttcgagaagtcgatgcagaatctccagacgaaggtagcagctcccaggagagcccccagcccagccctcragggacccstccccctccccagagcctcggcacaggcctgggagccagctgyggtgggcacgtagggtgtggaagggtgtgggcacaggggctggtgcgggayggggaggggcagccctgtctggacccttttcctgcagatccaggcaaagaaggagcaggtggctgaggccagggcagagctgaggagggcgagggctgagcacaaagcccaaggggatggcaagtccaggaggtgagtacccgtgccctcagacgccttctcccggggccctgtcccaacccgtagggtccagccccacagggtcggtgggagacgacccttgttgtctctccttgtgcggagacgagagattgtagaaataaagacacaagacaaagagataaaagaaaggacagctgggcccgggggaccactaccaccaagacgcggagacyggtagtgrccccgaatgtctggctgcgctgttatttattgtatacaaagcaaaaggggcagggtaaagagtgtgagtcatctccagtgataggtgagatcacgtgggtcacatgtccactggacayggggcccttccytgtttggcagccgaggcagagagagagagaacagtttacgccattatttctgcatatcagagacttttagtactttcactaattttctactgctatctagaaggcagagccaggtgtacaggatggaacatgaaggcagactaggagcrtgaccactgaagcacagcatcacagggagacggttaggcctccggataactgcgggcgagcctgactgatgtcaggccctccacaagaggtggaggagtagagtcttctctaaactcccctggggaaagggagactccctttcccggtctgctaagtggcaggtgtttttccttgacactgatgctaccgctagaccatggttggcctggcaataggcatcttcccagatgctggcattaccgctagaccaaggagccctctggtggccctgtctgggcataacagaaggctcgcactcttgtcttctggtcactcctcactatgtcccctcatatctctgtatggcctggtttttcctaggctgtgattgtagagcgaggattattataatattggaaaaaagagtaattgctaccaactaatgattaatgatattcatatataatcatatctatgatctatatatagtataactattcttatgtattttattatactggaacagctcgtgccctcagtctcttgcctcagcacctaggtagctgccgcccacaccaacccagatgtggcagcttcagacgcgccttcccatggccagttttgttttcctcttcaattgttattttgtgatttttttttttttttttttgagatggagtctctgtcgccaggctggagtgcgctggcgcggtctcagctcactgcaacctccgcctcccgggttcaagtgattctcctgcctcagcctcccgagtagctggggttacaggtgcgcgccaccacgcccrgctcatttatttatttagtagaaacggggtttctccatgttggccaggctggtcaaactcctggcctcaagtgatcctcctgccttggcatctcaaagtgctgggattacaggcatgagccactgcacctggccaactttgtgatttttaaaaatacaaactatatgccttgtggacaagagtgggacacatggagccgtgggaggaggagaccctggccgccgaggaggtttgtgattgtcattgtggggtcaggaaatgagaagaaggtgccagactcttctccagggcggcggcaccatcccctccccaccagcagtgtgtgagggctccgattcctctgtccaggcgccactgtagggtcagttttccatgtgtcgattagagcccagtgggtgtgaaggagcgtctggccgtgggtgctctttgcaggtgcttgttgcccacttctgtatcgtctctggagaatgactgctcaggtcctctgtccattttccagtcgggttgttgttttattattgacttgtaagagctcgtcgatgtttcgcccactcttgggttgtctttgttctttcttttttttttttttcctttggagacagagcattgctctgtcgccaaggctggagtgcaatggcatgatctcggctcactgcaatctctgcctccaggkttcaagcaattctcctgcctcagcctcctgagtagctgggattacaggcacccgccaccatgcccggctaatttttttgtattttagtagagacggggtttcaccatgttgcccaggctggtcttgaactcctgagctcaggcaatctgcctgtctcggcctcccaaagtgctgggattacaggtgtgagtcactactcccagccctattttttttttttttttttttggtgatggagtcttgctctgtcacccaggctagagtgcagtggcgtgatcttggcttactgcaacctctgcctcctgggttcaagcgattctcctgcctcagcctcccgagtagctgagactacagacacacaccactatacctggctaatytttgtattttagtacagatggggtttcaccatgtcggtcaggctggtcttgaactcctgacctcaggtgatccacccacctcggcctcccaaagtgctgggattacaggtgtgagcaactgcgcccggccacatctttcttctttcttgttggtgtcctgtgacacatttaagatttggatgagtcagcgtgctgagaaggctttgcctaacccaaggccatgaagatagatttctctgttttctcctaagaggtttattggtttactcttacatttaggtcattggttctgagttaatttttgtgtgtggtctgagggaagggcccagggtcattctcttgcatgtggacagccagatgtctcagcatcctagctcaccatagtctcaacttgctgggctcaagcaatcctcccgcctcagcctcctgagtagctgggaccacaggtgccaacggccacaactggctaatttttacactaagaaaatttttgtatgttgcccaagctactcttgaactcctggctttaagcaatcctgccttggcctcccagagctctgagattaaaagtatgagccaacrtgcctggcccttaggactgtatctataaaggccatattgtatgcaaacagagatagttttactttttcttttccaatcatatgccttttatttcatatttttgcattatggacctggcaggaatctccagtacactggacatgagtgggcagccttgccttgttcctgatactgggggcaaaactctcatgcttttatcatggaatatgatgttaactgtaggtttttcacagaagctgtttgttaagttaacaaaatttacttctattcctagtttgttgaggttctttttttttatcatgaagagcattggattttgtcaaatgattttctgcacctgttgagatcttgtttttgtcccttccttatattgataggatgtattatactaattgatcagatatgaaaccatccttgcattcctgggataaatcctacttgagcaattgtgtaatcatttttgtctattgctggattcagtttgctgatattttgttgaggtttttgcatctgtattcatgagcatgttagtctatagttttcttatgatgtcattgattttggtatcaaggtaatactggtaacgagttgaataatatttaatataatatctaatatttcatgaaagtttatgaaaaattggtgcctttttaaagagagagtcttgctgtgttgctcaggctggtcttgaackcctgggctcaagcagtcctccgaactcagcctcctgaatagctgagactataggcttgcactgcactgcctggctagggtcagtttgttaaatgaattcaccagtgaaaccatctaggcctgggcttttctttgggagacgtttaaagttactgatataatcacttgttatagttctattcatattttctatactttgtgagttggttctggtagtttgtatctttctgggaatttgtttagtctagggtgtctaactggctggtgcccagttattcatagtattcccatattatcttttttatttctttagtgatgttccctctttcattcattcctcattattgtggctgcggttcttttttttttttttgacacagagtctctcactctgttgcccaggctggagtgcagtggcatgatctcagctcaccacaacctctgcctcccgggttcaaactattttcctgcctcagcctcctgagtagctgggattacaggtgcacggcaccatgcctggctaatttttgtatttttagtagagacggagtttcaccatgttagccaggatggtctcaatctcctgacctcgtgatccacccgcctcggcctcccacagtgctgggattacaggcgtgagccactgctcctggcctggctgtggttcttaaagggtaaaagttttctcttcaggatgagcatccggagatgcaggggtctgtttttaatggtggcgtgtgcgaaggaaatgtcaattggaacaaagggtattcagtgaaaaataaggctgtgactcacccctgacctcctgtccccagaggcagctgctgtgaaatttctttagcatttcctggccaggcaaggttgctcatgcctgtaatcccaacactctgggcagccgaggcaggcagatcacttgaggttgggagtttgagaccatcatggccaacatggtgaaaccctgtctctgctaaaaatacaaaaaaaaaaaaaaaaaaaaaaatcatgtgcgtggtggcacatgcctgtagtcccagctactcaggaggcaggagattcacttgaacccgggaggcagaggttccagtgagctgagatcrtgcaactgcactccagcctgggtgacaaagcaagactccgtctcaaaaaaaaaaaaaaaaagccaagagaaatttcttaagcatttccagaaggactgtgtgtgcgtgctggctcttcctctgttttccctccttgttttcacataaatagcagcccctcatgtgcccctcggcccctggggatgtggctcatgctgggaaggcacttccccggacctatgcttctggcccggcgggctgccccattctcagccgtatttttgcaggcgcaagtttgtctttccacgcacattcgagtgtttgtggcacaaattcctagaagagttggggtcagaggttgcatgtgtgggtgatgttctggcattggagggtgcaagtaatgtggaaagggcatctctgtgctgaaatttgctttccctaaggaggcaggaaggagggcttagcggcttcccggaggttaaaggacatttgtgtttgctttctcgggcctggtctcgctgccctcatcctgtttgggccggcctcagtctgttgtgtcgagcatctcaccctcctgcgagtcaggtcctgacgggctgctcaccctccacccacggccctcctctgtatctgacttggcagctggggtggggctgagcttccacctttgatcccggctggtcttttgctgtgatggatgactgatgacaatgacagggacagggctgcactgggagggaaggcggcagggccagagaagtgcaggtctcctcaggtggcgctagtccagcgcggggcctcgcggcctcctcttctcttgccagtgtcctggagaagaagaggyggctcctggagaagctgcaggagcagctggcgcagctgagtgtgcaggccacggacaaggaggagaacaagcaggtggccctgggcacgtccaagctcaactacctggaccccaggatcagcattgcctggtgcgtgtgcctggggtctcagttcccacctgtggcctatggggggcctgggttttccaggaggcctctgttcagtcccagcattgcccttgtcccgtgtcccctggggtcagcacaggccctccctgtgacmrggacccatgatgctgagtcctgtgtcatcagctctccctgccctgaacgttcggatggacagggtgaagtgggggtgctgacagtggcctgggactcggaggcatcaggagggcctgtggagctcagcctgcccacagggagtgggaggtggctgagcgccctgctcggtggayacctrrgccacagcaggttgtctttgacacctcgctgatgctccagggtggcggcaygcgtggggtggggttggcctagaggagcaggtcccagctacaccaggcggctctggtgtctctgctgcatggaggaygctcgcccttgccgagcaccctgacctggccttcaaggtgggtgagttgcctgcttgcctgggctgaygctgcctcccgcaggtgcaagcggttcagggtgccagtggagaagatctacagcaaaacacagcgggagaggttcgcctgggctctcgccatggcaggagaagactttgaattctaacgacgagccgtgttgaaacttcttttgtatgtgtgtgtgtttttttcactattaaagcagtactggggaattttgtacaataaaatgtgtgcaagtgcttgtacatcactagaaaaagtccccaggccggccgggcacggtggctcacacctgtaatcycagcactttgggaggctgaggcgggcggatcacaaggtcaggagatcgagaccatcctggctaacacggtgaaaccccatctctactaaaaatacaaaaaacttagccgggcgtggtggcgggcgcctgtagtcccagctactcgggaggctgaggcaggagaatggcgtgaacccgggaggcggagcttgcagtgagccgagatcgtgcccctgcactccagcctgggcgacagagtgagactgtctcaaaaaaaaaaaaaaaagaaaaagaaaaagtccctaggccaggcacagtggctcatacctgtgatcttggcatgttagaggcctgaggctggaggatcgcttgagcagacattgaggctgcaatgagctgtgattgcgcccctgcactccagcctgggcaacagagcaagaccccatctcaaagagaaagaaaagtccctgaygcctgccgtgtcctttgaagcctccaccccgagcatggagtctgctgggytgtcacatccaatcagcgtcccagcctggacccccggttcccgctcgacaggggaggagaaacaccttcgtgtgctctgaggctgaggactttgggtgaggattccacatttgcgcacgcgccaccctctcagcggggcccggactcttcaccaagttctttagcgcctggaattcagcaagggcacagttgctgcctggtcactaagcccagcggcccccgttcagttctcatcacctccacactctccttacgtagctcttagctcttacgatggccttctgcctgagcttcccaaccctgtatcctctcagagctgcctgtcggctgccctctgccacgcgggatcctctgccgccctcttctctgccacgcgggaccctctgccgccctcttctctgccacgcgggaccctctgccgccctctctgccacgcaggaccctctgccgccctctcctctgccacgcgggaccctctgccgccctctcctctgccacgcgggaccctctgccgccctctcctctgccacgcgggaccctctgccgccctctcctctgccacgcgggaccctctgccgccctctcctctgccacgcgggaccctctgccgccctctcctctgccacgcaggaccctctgccgccctctcctctgccacgcgggaccctctgctgccctctcctctgccacgcgggaccctctgccaccctctctgccacgcaggaccctctgccgccctcttctctgccacacgggaccctctgctgccctctcctctgccacgcgggaccctctgctgccctctctgccacgcaggaccctctgccgccctctcctctgccgccctcttctctgccacgcgggaccctctgctgccctctcctctgccgccctcttctctgccacgcgggaccctctgccgccctctcctctgccatgcgggaccctctgctgccctctcctctgccacgcgggaccctctgccaccctctctgccacgcaggaccctctgccgccctcttctctgccatacgggaccctctgctgccctctcctctgccacgcgggaccctctgctgccctctctgccacgcgggaccctctgccgccctctcctctgccacgcgggaccctctgccgccctctgctatgcgggaccctctgctgccctctcttctgccacgcgggaccctctgccgccctctctgccacgcaggaccctctgctgccctcttctctgccaccctcttctctgccacgtgggaccctctgctgccctttcctctgctacgcagggccctctgccgccctctctgccacacgggaccctctgccgccctctcctctgccacgtgggatcctctgctgccctcttctctgccacgtgggatcctctgccacgcgggaccctctgccgccctcttctctgccacgtgggaccctctgctgccctctgccacacgggaccctctgccgccctctcctctgctacgtgggatcctctgctgccctctcctctgccacgtgggatcctctgccatctgctccgcgctttgctttcggggctgcctctgtggctgtctccctcacaccggggctcccgccaaccccatgaggcagcccctgtgtaaggctcctggtcagccaagaggaccccagcgccctggaggctgcacccccatccctcctgctgtggggcccttggtgctccakgcccgagtctctcacaccgcggctcacccgctgccccaaggggctccggcagcaggtccagctcctcccggggcctgtgacagaacagttccagcagggggctctcacgtccccacctgctcccagagaggtgcttctgtgcccagacatggaacagctccacagaaaatgagggcactggccgagcaggcccagactccagaagggaaaccactgagggtgcaggcccgacccacatcacctcggagtctgtcctcgcggagacggtgatgggcctttccctctctgtacagatgaggacacacaaggagctgacttcatgcctggacattaagcccaggaattcccagcctagagctggctctctaggttgcggggtctggtcccagtccagaaacatctcccaagccacacctcaggacacagcagggtgggggtcgagggggtgagtgggagctccagggagaggcccctaaggctgttccccgtcatcagaacttgcaggccagtggcctctaaaggtactcattagagggctgtggacctcacttgcccaaaaccccgggactgctcagcgcatccttctgagacgtgaggctgtgaccacctgctgcctcagcgtccccttctcaccccgaacaacctgcctttaacccaactctccagactgacacgatccctgtagactgtcagagcctcgtttggatagtcacagactacctggataaaagataaaacatggccgggcgcggtggctcacgcctgtaattccagcactttgggaggccgaggcgagcggatcatctgaggtcaggagttcaagaccagcctggccaacatggtgaatccctgtctttactcaaaatacaaaaattagccaggcatggtggcaggcacctgtagtcccagctgctcaggaggctgaggcaagagaatcacttgaacctgggaggcggaggttgcagtgagctgagattatggcattatcctccagcctgggcgatgagtgaaactccatctcaggaaaaaaaaaaaaaaaaagataaaacatgcagagtagaaaccccaggtggacagatacctgtcccacccagagaaaagctgggtggtgccatcgacgggcaaaagtagtggaaaagccagctgcgtgtgctggtgcgagatgcgtttccatgatggaggatgccgcgcactcagcctctcctgttatcctgtggcctgcgagccctctcttaagtgcaccaagagcagcaagggacttagagcaacttcattcactgctgcccaggcggaaaagggcgcccaggccctgcagctggaactgggtaacaggccgggtggagactcacactggatcccactcagccatgatcacaagaacagagcgactgctgctcgggtctcacgggcgactgacagcaaccgggagccctgacgccttcccgacaccccctgttccatccacgaacaggcacgcccgccgttgtttgagtttttacatgttgacaccccctgctccatccacgaacaggcacccaccgttgtttgagtttttacatgttgacaccccctgttccatccatgaatgggcagacccrccatcgtttgagtttttacatgtttgtgagtaatgttccatctcaacagcctgggcaacataatgagaccctgtctctcccaaaacaagcaaacaaaaacccccaaaattagctgggcatggtggtgcgcgcctgtagtctcaagctacccgtggggctgaggttggaggatgagcccgggaggttgaggctgcagtgagctgtgattgtaccacggccctccagcatgggtgaccctggcttaggaaaatttgtaataataacatcccatctctcagtttacatgtagaaatcttacacatctttcctaaatatcatgtaagtcagtcccaggtgtgttatgtcctctgagtctattctaaatggtttcttttggatttttttttccttttctgtcagatgctttaggtactgattttctcctctcygcctggctggaacatccgtctgcatcggacgggcttccttctgcacctgtgacctcacaagggctctccttggggaggcaggaccagagcagccctgagtaaccgggcacagccgaggaacaggccccagggaggccaggacccgggtcctcacgcctgcggccacagaagcaccgtgtccctgcagctgtgagccaccaggcgtctgggtgggtggttactcagcaagtgccagtagagaaactgggtcccagagttggggttgctgtggactggatacttgtccctcacctccagttcacatgttaaagtcctcacccccagcaagacagtgttggaggtggggcctttgggaggggagcaggtttagagaagatcctgggggaccctcacgatgagatgagtgccctcatgggaagagacaccggagcctcctctccaggagcacacacgggacggtcacatgagcaagaggctgctgtccgtaagctgggggtggtccctcaacaggaactgggtctgtggcacctggaggctggactcccagcctgcagagctgggagaaagaaatgtctgctgtgaagccagtcggtctgtggaattttgacacagcagcctcgtctaagacaggtgccggcagagccacctcgtctaagacaggtgttggcagagccacctcgtctaagacagctgttggcagaagcaacacctaagacgcagtgcactgactgcgagtgcagtctggggctggagaacagaaacacggggaggagactattagcagaagaaaccatgattaggtagtagtgaaaaatttgggtgaaaaaaattgcctttgggcgggtgctgtggcctgtgcctctaatcccagcactttgggaggccaaggtgggtggatcacctgaggtcaagagttcaagaccagcctggccaacatggcaaaaccctgtctctactaaaactacaaaaattagccgggcgtggtggcgggcacctgtaatcccagctgctcaggaggctgagacaggagaatcaattgaacccgggaggcagaggctgcagtaagccgagatcgcaccactgcactccagcctgagaaacagaaccaggctctgtctcaaaaaaaaaaaaaaaaaaaaattgccttcagtaacttggaaattagaaaatggacccagctaagcagagctccagacagagtggcaaaaatgtcagcggaacgctcctcgtggcactggtgaggcctgcgagcgtgaaatgtgtgaaaggagggatcgtctagtctgcaggcggaatctggaggacacagagccggggcctgaactggcttgggaaacaaaaccatctcacatcttgtctctgcagtcagcaaagcattttctttcaaaagttgttttaaatttacttttattttttagagacaagatctccctatattgctcaagggatcctcctgcctcagcatcctgatcagttgggactgtagggtgtatcaccactgcctgcaaagaattcaagtagtaagtggcctcaggataaagataaaatcaaggttgtggccatatccattgttaaggccccagaaaagtttaccatgttggggctgggtgtggtggctcacacctgtaatccccgccctttgggaggccgaggtgggaggccaggagttcaaggctgctgtgaactgattgcaccactgcactctagcctgagtaacagagcaagagcctgtttttaaaaaaaaaaaaaaaaaaaaaaaaaaaaaaaaaatatatatatatatatatatatatgctggaagatagtatatagtacaaatcctctcagctagacaaaagtgtttctaagaccctaaaggatgttttcccacaacatgctaacacatcatatgaaacagagaaaacactgacaaatgtttaagtatattttttgtctagtggagaatataatctaagaaacccacaagattttgtttgtttgtttttttgagatggagtctcgctcttctgccaggctagagggcagtggcgcgatctcggctcactgcaacctctgcctcctgggttcaagtgattctcctgcctcagcctcctgagtagcggggactacaggtgcgtaccaccacacccagctaaattttgtcatttttatcagggacggggtttcaccatgttggccaggatggtctcaatctcttgacctcgtgagccacccaccttggcctcacagagtgctgggatacaggcgtgagccaccgcgcccggcccgaaacccaccagatttttaagggcattgtgtcagtttaaatgaacagagatggaaacagctgaaaatgaagcctttgggttccctccttctacaggcagtaagcagctaagaaagctgcttagcctcaaatacaggctatcggacatctaaaaacacagaggagagagaccaagggcagagccaaaatctgagggaaaaaaaaaggataataatgtcacttccagggaaaatgaggccctaaaaaagacacagactctgcccccttaatgaggtcccttggcaacatgctgttgactgagtcaacagagtactacagactggggtctgcagtgaatgagcccccaccgctctctttttcaaacgagagagttattgtgcttatcctgggcctgtctcaaaatcctgtgctggggtcgaggcaggtaattttttctttagtttatagcctcaagaggcatctcacacacatccggaccagaggagaatcatgagctgacggcctctgagctgagacagcagcaggaagagacctctgggtggcttgagtggggggtggcgagcatatttcacttgtggaaggaaagtaagtcactgtggctccagagtggactgtgggaaatatcggacggtcccaggacacgcggctctctctgcccagccctggggctccgttgtcacgtggggatgcccctcaccactttttttctatgaaaccccatttacaagattccacttcttcctttttttttttttttaagacggagtcttgctttgtcaccaggctggagtgcagtggtgtgatcttggctcaccgcaacctccgcctcccgggttccagcgattctcctgcctcagcctcctgagtagtggggactacagacacgcgccatcacacccagctaatttttgtattttttagtagaggcggggtttcacgatattggacaggctggtctcgaactcctgacctcatgatccacctgcctcagcctcccaaagtgctgggattacagcacagtggccagccccttcttcctctttcttggtttgctcccttgatttggagctcctcctttagtaggctcctgaaaacatgtattttgaaaatgaatttttaaaagtaagagtttgcatatctgaaaatgttgtcatactgtcacacttgactgaccacttgggtaggtataaagttctaggttggaaattattttcacttgtaattttcgaagcattgttctgtcattttctaacttccagtctgcccttgggaagggatttattcctcagcctgtgtgtgtgatctgcgctttcagatcgtctctatgtcctggactgtctgatgtttcacgtcatgcctggatgtaggtcgttccttccatctttgtgcgagatatcggtaggtgcttttactctggagattcatgtttctcggttctgggggaaaattatttctctaataacttcattcccaccattttctgtttttgttttcccctccttggaattcctgttagtcttaatctttctatcctgtcacccaccttcttgtcttttcattctttcaaacagattttctccactttccaccttcttgctaatttaattttgcccattacatttccatctctaagacatttttattatttttttatttttttcgaggtggagtctcactgagcctgagtgacacccaggctgggagtcagcggtgtgatcttggctcagtgcagcctccgcctctcaggttgagtaacgcccaggctggagttggcggtgcgatcttggctcactgcaacctctgcctcccaggttgagtgaagtccaggctggagtacggtggcgcaatctcggctcactgcagcatctgcctgccaggttcaagcgattctcgtgcctcaacctcccaagtagctgggattacaggcgcagaccaccacacttggctaatttttgtattattaatagagatggagttttgtcatgttggccaggctggtctcgaactcctgacttcaagtgatccgcccgtctctgcctcccgaagtgttgggattacaggggtgagcgaccatgcctggcccatcattatttttgagtttcctttttaaaacaatgttctgggcttcatatggcacctgagcttgcctttcttcccctggttgactcacgcctccctcctgtctgtcttcatgtgtgtgactctgggtcacagattttcctcctaatctttatgtgtgtttgtgtgtatgacagtctcactctgtcacacaggctggagagcagtggcgcaatcttggctcactgcaacctccgcctcccaggttcaaaccattctcctgtctcagcctcccgagtagctgagattacaggcatgcaccaccacaactggctgatttttgtatttttagtagagacggggtttcaccatgttggccaggctggtctcaaacccctgacctcaggtgatccacccaccacggcctcccaaagtgctgggattacaggcatgagccactgcacccagtcctaacctttacctgtcaaccggcaattctatacagcttactgtggttagggacatatttagttttgtttccaccatcttaatttgcccagtttgtttctgatttttttttcttttttgagagagggtctcactcttttgcccaggctggagtgtagtggtatgactacagctcactgcagtctcgagctcccaggctcaggtgatcctcccacctcagcctcctgggtggctggaactataggcttacttactgtattttttgtagagacaggttctccctatgttgcccaggctggtttcgaactcctgggcttaagcgatccacccaccttggcctccaaagtgctgggattacaggtgtgagccacagcgctcaggcccagcctgatttcgttcttattttttaattgacagaagtttgtgttcagttcatttatttattttatgggctctcactgtgttgtccagtctggagtgcagcggcacaatcatagctcactgctgcctcaaactcctggtctgaggatccaagccgagatcctcctgcctcagtctcccaagcagctgggactacattttaaatcacagtgttttattctttttattggattagagatgtatagactggttacactcttttagtaattaacattaaattacactatgcacatttaacttatcaaagtcaaattaaacactatcttacaccctcttcccaacaaccggagggtcttagaacatttctgtcccttctaatttacatgctattgttgtctagtattttagttgacactattcttttatatatatatatgtattcatatttataattttatttgcttgccattccatcttatatctaagaccatcactcggctcattttcctttatttatttatttttttaagatggagttttgctctttttgcccaggctggagtgcaatggcgtgatctcggctcactgcatcttctgcctcccaggttcaagggattctcctgcctcagctgcccgagtagctgggattacaggtgtgggccaccatgcccagctaattttgtatttttagtagaaatggggttttgccatgttggccagggtggtctcaaactcctgacctcaggtgatccactgcctcagcctcccaaagtgctggaattacaggcgtgagccaccgtgcccagccctatgttgcctaggctggtcttgaactcctaggctcaagtgatcctcccccttaggcctcccaaagtgttgggattataggcatgaaccactgcacctggcctgtttttcatttccaaaagttctttaaggagtcctgcctattcatgcgtgacagtatgtaccctacagctttctcatcactgactgcgcgacttctttgaacacctcacacataactatcctctcacctgtatgatgacagtttcaggatctgcgtttctttgtggctgacagcggctgcctgctgtttctgttggccctcagtcagctgactctccttgtgtgcttggggatctttgcaagctgaatgcctgacttacgagcaggaatgaggctaagccaggtaagcttccttcagggagcaggtgctttgaccgctactggtacctgaggatcttggctcagcatgggagacacaggctcatcttcccacctcacca

SEQ ID NO: 94421 - DNA, 27616 bp, Homo sapiens
  misc_feature (1)...(27616): n = A,T,C or G
tcctgagtagctgggactacaggtactaccatgcccgtctatttttgtatttttttagtagagatggggtttctccatgttgtccaggctggtctcaaactcccaggctcaagcaatctgcccgcctcagcctccaaaagtgctgtaattacaggcatgagccactgctcctggcagggaactaatagaatcctgggttcttcggtgtgcaataaatctcaaatacagtctattcaaccatagattttaaatatttgttagtgaaggtgacaaaaaaataagtgattaagagaacctattttctatccaatgagctatcaaaagcttatagagtggaaagagagtgggggaagtgaggctcaaaacagctaaatggaaagaagattttgcatgcaggctgaactggattttcatcctggctactatattctccagatgtgtcactttggccaagatccttaatctcagtgtcatctataaggtaattaaagtacactagtgccccactaatctgtggttttgctttccaagctttcagttacccgagatcaactgcggttttaaaatattatgtggaaaattccagaaatacatagtaagttttcaattgcatgccattaaatctcatgctgtccctgaccccttcctctccggaggtgaatgctccctttgtccagtggctccacgatgactacattccccaaattgttctcttaggaaccctttctgtgttcaaggaacccttactttacttaattatggccccaaagcacaagatagggatgccggcatactgttataattgttctattttattattagttattgttgttcatctctacctgtgactaatttatgaattcaactttatcataggtatgtaggtataggaaaaaaacatggtatgtataaggttcagtactatctgcagtttcagacatcccctgggggtcttggaacatatcccccgtggataaggggaaactactgtaaaagtttgtgttttatagagtagttgtgagaactacattaatccataatgtgtggctcatgatactcattgatagatggtagtagcaacaataaaaaataatattatcaagtaactgattcataattgactctcaaaaacgttaattttctgctttcctttacctaagtttacctacatgtttgaatttgtaaagggaaggtttttctagaccaataattttcaaatatttttgctctcatacttcctcaaaggaaactgaaaaagttgcaacatacttgcatgtcatttttctatataagttgaaagaatagcaaattgttattttcccacgcatcgtaaagattagcaggtcatccctctttaaaatgtaccaaatggaatctaaatatcatcgcaatttgacccagcatcatccatttaaacaaatatacaagtttttctttaacaatgagaaattttatctcattacattttctccctaaactcttatttcaatctacattcctaagaattttatcctaatgtagtatatttttatgcttaaatatcttttgttgatcaacacaattttgatcatttttaaattttaaaaattaagaacatcctgtgacatcaaattctaggtatgaaatatttattctagattgggtgatcattataattattttttgtacataattgatcaaaataacataaatatactacaaatttctatgactactaaacatataaaagtaaaattttaaacaaatatatctcttaatgagaaggaagagctttttatactccaataagttaacgtatccactaataattattatttcttcctagaacaagacaggattaagcatcatgaccgtccctattgggggatgtttttatagatgcaagcactgtggcacctactggtataaatgcacctgctgattggaatgttctttccccagatcttcccctgctggtttcttcccagtattcaggtctcagctcaaatgtgacttcctcaatgaggcctcctggtgatcagatctaaagcaccctctacacaatcactgtttagtgctatacccattaatttactatcatcacacttgtcactatctgcagatgtcttgtttggttacttttgtagtgtttgtcactgccagaatatcagttctatgaagaaaagggccttgtctgtcttgctgtttgtagacatgaggaaggcaccatgatataaatgtgtgttaatgaatgaatgaatgaaatttgtctgagagaaccattcattctaaccaacatttatggagtaactactttgaaaagaaccattctgtctttactatcaagccaagatactcaaggaaggcagcagaagtggaagctccatgtgggcagaggagcctagtcttgagatgtgatttagctggtatttgggtgaaacaaataaaccagcctcaaaataacacaaggggccgggtgcagtggctcacgcctgtatcccagcactttgggaggctcgaggcaggcagattacttcaggtgaggagttcgagaccagcctggctaacatggtgaacctccatctctactaaaaatacaaaaactagctgggcatggtgatgggtgcctgtaatcccagttactcgggaggctgaggcaggagaattgcttgagcctgggaggcagaggttgcagtgagctgagattctgccactgcactccagcctgggtgacagagcgagactccgtcgaaaagaaaaaaagaaagaaagaaaaaaaacacacaaggatgtgcaactgatgcagggcaggtgagcccagaattgggcttagctcaggagggttcttggttttgctcaggaaagaatttaagagctacctggtagaagaaaagctctactgatatggcaacagctccctgagtgcccctgtagagcagagctaccctataggcagtgtgctgacagcagtagcttaaaggcaggtctgcagtgatatttataacctactttcaattacatgcaaattaaggggcagattatgcagaaatgtctagaaaaagggtggtaacttccggttgtcggctcactgccatggaaaggggcagtaagctctggatgttgccatgacaatcgtaaactgacatggcacactggtgggcacgtcttatggaaaactacttctgccccatccttgttttgactactcctcaatttggtcccatgtcagagccctgcctccagagtcaagccctgtctacctcacaattattatgtatcaggtttttaaaaaataacacaagtaaggctgggcatggtggctcacgcctttaatcccagcactttgggaggccgaggtgggcagatcacttcagatcagaagtctgagacaagcctgaccaacatggtgaaaccctgtctctcctaaaaatgcaaaaaaaaaaaaaaagaaaaaaaaattagctgggcatggtggcaggcgcctatagttccagctacttgggaggctgaggcagaattgcttgaacccatgcagcggagtttgcagtgagctgagcaccactgcactgcagcctgagggacagagcaagattccacctcaaaaaaaaaaaaaaaaaaaaaaaaaaggaaaaagaataacacaaggaaattaaacacagataacgtgcatctggataatctggaatattttcagcctgggatcttcctcgtgctcggaaacgtgtagggaaacgtgtagggacagttttcagctggtgtggggtgggggaatgccaacatatggttggctttccacagtcctgctaaagccctgcaatgtgcagaacaaaccggtccagctaagaaaagtcccacccaaaatgctgagagcacctctgtactcaatcaaccgttgaggtaaaaggatgcttgcaagtacaacacatgtatcagtgcattttaaactcattataaaatcgttctgtaaaccaaaaataaaattctacgcccagaaccatctgaaaagaccactcctctgggtcaaaggcattccaaatttaaccacaaaaactagttcaggccatgatgggaaggggagccagacatgcctcattattccctcctccgtttggaatttaggcacagctgaccagcattgacatcaacacaggcctcaagacaggtagaacacactctttaagtctgacaagaaacatttacaatctatctctctaaagcctgctacctggaggtttaatctgcatgatgaatccatggtctccacaaccccttatcttaacccagatattcctttctattcattcaaatcttttttttttttttccccatacggctctgtcacccagactggagtgcagtggcgctttctcagctactgcaagcaacctccgcctcctgggttcaagcgattctcctacctcagcctcctgagtacctggggttacaggcgtgtgccacctcgccccactaatttttgtattttcagtagagagggtttcactatgttggccaggatggtctcaatctcctgacctcgtgatctgcccgcctcgacctcccaagtgctgggattacaggcgtgagccaccgcgcccagccctctattgattccagatctttagataacaattctttcaaccaaatgtataaaaaatcaagttgtagcccaaccaccttggggacatgttctcaggatctgctgagggctctatcaccggccattggtcactcatatttggctcagaataaatttcttcagatattttacagagtttaactcttttcatcaacagttcccactccccagtgttaatgttataaacaattcagtaaaactgggaaatgtggtctattaaaaacttggggccgagtgcggtggctcacgcctgtaatcccagcactttgggaggccaatgtgggtggatcacctgaggtcaggagtttgagaccagcctggctaacatggcgaaaccccgtctctactaaacatgaaaaaaaaaaattagccgggcgtggtggcgggcgcctgtagtcccagctacgcgagaggctgaggcagcagaattgcttgaacccaggaggnnnnnnnnnnnnnnnnnnnnnnnnnnnnnnnnnnnnnnnnnnnnnnnnnnnnnnnnnnnnnnnnnnnnnnnnnnnnnnnnnnnnnnnnnnnnnnnnnnnnnnnnnnnnnnnnnnnnnnnnnnnnnnnnnnnnnnnnnnnnnnnnnnnnnnnnnnnnnnnnnnnnnnnnnnnnnnnnnnnnctccagcctgggtgagagagcgagactctgtctcaaaaaaaaaaaaaaaagaccgccagggctcaaacaaaaaacctcggaaaagccctggcggtctttttttttttttttttttttttttgggacagtcttgctctgtcgcccaggctggagtacaatggtcggatcttggctcactgcaacctctgcctcccaggttcaagcaattcttctgcctcagcctcccaagtagccaccacgcccagctaatttttgtatttttagtagagacgggggtttcaccatgttgtccaggctggtctcgaactcctgacctcaggtgatccacccgcctcggccccccaaagtactaggattacaggcgtgagccaccgcgtccagcgccctggcggtttttaatcaagtagaaaagctgcattataccacttgcttcggttgccttcagtgagaacgaagaaatggaaatgcaaatcccttattagttgtaggaaacagatctcaaacagcagttttgtcgacaagaccgcaggaaaacgtgggaactgtgctgctggcttagagaaggcgcggtcgaccagacggttcccaaagggcgcagtccttccccgccaccgcacctgcatccaggttcccgggtttcctaagactctcagctgtggccctgggctccgttctgtgccacacccgtggctcctgcgtttccccctggcgcacgctctctagagcgggggccgccgcgaccccgccgagcaggaagaggcggagcgcgggacggccgcgggaaaaggcgcgcggaaggggtcctgccaccgcgccacttggcctgcctccgtcccgccgcgccacttcgcctgcctccgtcccccgcccgccgcgccatgcctgtggccggctcggagctgccgcgccggcccttgccccccgccgcacaggagcgggacgccgagccgcgtccgccgcacggggagctgcagtacctggggcagatccaacacatcctccgctgcggcgtcaggaaggacgaccgcacgggcaccggcaccctgtcggtattcggcatgcaggcgcgctacagcctgagaggtgacgccgcgggcccctgcgggacgggtggcgggaaggagggaggcgcggctggggagagcgctcgggagctgccgggcgctgcggaccccgtttagtcctaacctcaatcctgcsagggaggggacgcatcgtcctcctcgccttacagacgccgaaacggagggtcccattagggacgtgactggcgcgggcaacacacacagcagcgacagccgggaggtaagccgcgtcccagcggctccgcggccgggctcgcagtcgccccagtgatgccgtggcccccgaggcgggcgtcatcgggcagcgtttgcccagtgctggagggttagggagagctgcctgggcttgaccgcgcgccggtctcaaagtcctggctttggcccctcctccgttttcccctgtggaccattccgcttcgcagcgttttcaaaaactggagcgaaagtgatgtgggcggggcaaaggcggcgggragaggasagcactgaagctggcgcgggaacttggtttcctggtggcctcccatccaatccccacgaaccagctttcctcttaaaccttgaaaagagaaattcgggagttcgagtataagttcttagtcgtcctttcctctttcctttccgacaggagcaccccaggcaaaaaatgtctcgcgggtcattggcgccaggctttcaggggacagtggggcggggcggggtgggcacaggacgttaggcagccgttggccctccctaaggccacaccgtcctgccgtcctggatcctgcgccagctgcgcgggggaggggactcgaaggtgtgtgagccaggggctgaccttgaccgctcagataaatggagcgcagccttgacacaggggtggaggtggttttgaatggggaaacccattcgtggtgaagcagattcactgtagctagcggaaaagccctccggcccacggacccatctagagacgaatacatagcagctgctgtggctgattggcgtgggacagcgtggggagttttgtctgaggagagggatccacttttctgcagctccaagcccaggggcctttgatgagccatagacctcatttttaacccacctttctgcttagacattgagcaagttacttctcatatagcttccctatatgttaaaaatggagaaaataatgcttagtaggcaattctgataaaagcaggtgcttgcaaaaatctctctgttgtctgaatataaactgtaccacaagcgagtgcggatgaacgaggactgcatttaaagataagtttttacactttyatttctctgtggctcgacacttctgatgcctccctttttgttcctgggacacatgcttggtgttgtcttcacacctttgtgacaggattagcactagtgggcagtggatgatagctcctcccttttgccacatgttcatccctgccctcgccaccatctcactgtgtggaattcctgtgtccactggtcaccggggcacagaagtgctgtctcagcctgaatcgggccactgatgggacttgcagcctgggagctccaccgtgatctctggcccactttgcgggagtctaggctttctggatgctccagggcctcacgtcccagggcagttttcttccctgaagaaagttggatggcatgatctgtcttcccatcttgaaaccgtatggcaaattgtttttcagatgaattccctctgctgacaaccaaacgtgtgttctggaagggtgttttggaggagttgctgtggtttatcaaggtaaagaagtcgctgctattagaagtcagtagtctgttctcaacacagcagccagtgagatcctttcaaaactcaaagcagccaggtgtggtggctcacgcctgtaatcccaccrctttgggaggctgagtcagatcacctgaggttaggaatttgrgaccagcctggccaacatggcgacaccccagtctctactaataacacaaaaaattagccaggtgtgctggtgcatgtctgtaatccyagctactcaggaggctgaggcatgagaattgctcacgaggcggaggttgtagtgagctgagatcgtggcactgtactccagcctgggcgacagagggagaacccatgtcaaaaacaaaaaaagacaccaccaaaggtcaaagcatatcattcctcaccctcaagcccttagtggctccatttcactcagtaagagccacggtccttatggtgtccgtttttcagctctgaccttagctgctgctctctgcaccagccctgctgttcttgtgagtttttgagcacaccgggacatccccactccctggaaccttcttcccccacacttggcttcttcctttgagtctctactccactcgggcaagccttcctagacctcctgatttaaaactgtgactctcccccaacctccttggtgtttctccrtagacgaacatcaccatctgatgtatgtcagcctttcccttcccctgttagaagggggacagcaggtagtaaaagtgaaatgtgctgtaagctttatgagggcagaggatttgtttctcgtgttcactgttgtatcgccagggcctcaaacacagcctgccacatagtaggagtcaacatatattgatcactaaatgtagataccacctgtgttcccatgttcatataaattctagaagagtctcttcagtaacaaggtgaaccccttccagagggctgagtaggtacctcaggccggggccagagtgctgtgaagacaggcagcagcccagaccaagcttctctgtgttccgtgtcctggtctagaaccagcgatgttctttctgaccagtgctttttggaaggtggctgaggtctgggctcaggtctgggccatactagaagctgggatcccttctatagagcacttggtatggcttgtatggtcttggggcaagccagacccaagccctcttatcccattttagaaagggcttcaatttggatccagccccaggtctgccttagctctgtattcttggggtattttgttctgtattggcctatcttgactaacaatgarccttggatttgaaacatatcatcagaaacctcagaagacaacattcttaaactggctagagcctggtctgaatggatgaaaaggagagacttttgaagcaatatgtaaaagattgagaaatgatttgttggaaatttctcaattggagaaatttctttgatttgttggaaatttctttgattctttctcaatcaaagaaaatcgggacaaactcaacaatagaaagggaggaagcaagatactcagaaataaaatgcattcccctgtttcaacttaatgcttcaattcaggattctaaggaatccttgccaggaatgtcagactcaccttgatagttggagttactccattggtgactcgatcaaatacaggagttgaggcacctgcactgtaaaatactgattagtctgatcattaggaatatcctgtatgccaggtagaagatacattgaacagattgcatgtaggcattaaattcattttggggtattacatatagacaacacatttcattaagaaacataaaactgtcagatcggtggaatacttaaaagcacttggaggtgtttagcctaaaaagcttagttgaggggaatggaagaaaagatctgggagggtggttccaaagaagggatcagactrtcctaaagccctcaggaatctgggctgggaccagcctacttaaagataggatgggcagctgggtgtggtggctcacgcctgtaatcccagcacttcgggaggccgaagygggcggatcacctgaggtcaggagttcgaggccagcctgaccaacatggagaaacrctgtctctactaaaaatacaaaattagctgggtgtagtggcgcatgcctgtaatcccagctactcgggaggctgaggcaggggaatcgcttgaacctgggaggtrgagggtgccgtgagccacgatcgcgccattgcactccagcctgggcaacaagagcgaaactctcaaaaaacaaaaaaaaggatgggttccatatgggtggtgtcaagtgcccacctcctagcaagtcagcaggggccagaggcccttgtaagtggtgtctcggggggatcaactgagatggcttargatttacctggatgcctgctctgctctccccrtctcttccagggatccacaaatgctaaasagctgtcttccaagggagtgaaaatctgggatgccaatggatcccgagactttttggacagcctgggattctccaccagagargaaggggacttgggcccagtttatggcttccagtggaggcattttggggcagaatacagagatatggaatcaggtgaggagatagaacaatgccttccatttcccgggtgcccttcctagcaygtgtttgctccgttgttttagataaggtctgggggatgagtcaatgtcacaggagctgatgtatagctttgaccttgtgaggggtggtgccakgttaagccacaattaagcctcatgaaggccgtttcacactcttttttttttttttttttaattattatactttaagttttagggtacatgtgcacaatgtgcaggttagttacatatgtatacatgtgccatgctggtgcgctgcacccactaactcatgatctagcatcaggtatatctcccaatgctatccctcccccctcctcccaccccacaacagtccccagagtgtgatgttccccttcctgtgtccatatgttctcgttgttcaattcccacctatgagtgagaatatgcggtgtttggttttttgttcttgcgatagtttactgagaatgatgatttccaatttcatccacgtccctacaaaggacatgaactcatcattttttatggctgcatagtattccatggtgtatatgtgccacattttcttaatccagtctatcatgttggacatttgggttggttccaagtctttgcctattgtgaatagtgccacaataaacatacgtgtgcatgtgtctttatagcagcatgatttaatagtcctttgggtatatacccagtaatgggatggctgggtcaaatggtatttctagttctagatccccgaggaatcgccacactgacttccacaatggttgaactagtttacagtcccaccaacagtgtcaaagtgtcctatttctccacatcctctccagcacctgttgtttcctgactttttaatgattgccattctaactggtgtgagatggtatctcattgtggttttgatttgcgtttctctgatggccagtgatggtgagcattttttccatgtgttttttggctgcataaatgtcttcttttgagaagtgtctgttcatgtccttcgcccactttttgatggggttgtttttttcttataaatttgtttgagttcattgtagattctggatattagccctttgtcagatgagtaggttgcaaaaatgttctcccattttgtgggttgcctgttcactctgatggtagtttcttttgctgtgcagaagctctttagtttaattagatcccatttgtcaattttggcttttgttgccattgcttttggcataggcatgaagtccttgcccatgcctatgtcctgaatggtaatgcctaggttttcttctagggtttttatggttttaggtctaacgtttaagtctttaatccatcttgaattgatttttgtataaggtgtaaggaagggatccagtttcagctttttacatatggctagccagttttcccagcaccatttattacatagggaatcctttccccattgcttgtttttctcaggtttgtcaaagatcagatagttgtagatatgcggcgttatttctgagggctctgttctgttccattgatctatgtgtctgttttggtaccagtaccatactgttttggttactgtagccttgtagtatagtttgaagtcaggtagcgtgatgcctccagctttgttcttttggcttaggattgacttggcgatgtgggctcttttttggttccatatgaactttaaagtagttttttccaattctgtgaagaaagtcattggtagcttgatggggatggcattgaatctataaattaccttgggcagtatggccattttcacgatattgattcttcctacccatgagcatggaatggtcttccatttctttgtatcctcttttatttcattgagcagtggtttgtagttctccttgaagaggtccttcacatcccttttaaggtggattcctaggtattttattctctttgaagcaattgtgagtggaagttcactcatgatttggctctctgtttgtctgttattggtgtataagaatgcttgtgatttttgcagattgattttatatcctgagactttgctgaagttgcttatcagcttaaggagattttgggctgagacaatggggttttctagatatacaatcatgtcgtctgcaaacagggacaatttgacttcctcttttcctaattgaataccctttatttccttctcctgcctaattgccctggccagaacttccaacactatgttgaataggagtggtgagagagggcatccctgtcttgtgccagttttcaaagggaatgcttccagtttttgcccattcactatgatattggctgtggctttgtcatagatagctcttattattttgaaatatgttccatcaatacctaatttattgagagtttttagcatgatgtgttgttgaattttgtcaaaggctttttctgcatctattgagataatcatgtggtttttgtctttggatctgtttatatgctggattacatttattgatttgcgtatattgaaccagccttgcatcctagggatgaagcccacatgatcatggtggataagctttttgatgtgctgctggattcggtttgccagtattttattgaggatttttgcatcaatgttcatcaaggatattggtctaaaattctcttttttggtgtgtctctgcccagctttggtatcaggatgatgttggcttcataaaatgagttagggaggattccctctttttctattgattggaatagtttcagaaggaatggtaccagttcctctttgtacctctggagaattcggctgtgaatccatctggtcctggactctctttggttggtaagctattgattattgccacaatttcagctcctgttattggtctattcagagattcaacttcttcctggtttagtcttgggagagtgtatgtgtcaaggaatttatccatttcttctagattttctagtttatttgcgtagaggtgtttgtagtaatctctgatggtagtttgtatttctgtgggattggtggtgatatcccctttatcattttttattgcgtctatttgattcttctctttttctttattagtcttgctagcggtctataaattttgttgatcctttcaaaaaaccagctcctggattcattaattttttgaagggttttttgtgtctctatttccttcagttctgctctgattttagttatttcttgccttctgctagcttttgaatgtgtttgctcttgcttttctagttcttttaattgtgatgttagggtgtcaattttggatctttcctgctttctcttgtgggcatttagtgctataaatttccctctacacactgctttgaatgtgtcccagaggttctggtatgttgtgtctttgttcttgttggtttcaaagaacatctttatttctgccttcatttcgttatgtacccagtagtcattcaggagcaggttgttcagtttccatgtagttgagcagttttgagtgagattcttaatcctgagttctagtttgattgcactgtggtctgagagatagtttgttataatttctgttcttttacatttgctgaggagagctttacttcccaactatgtggtcggttttggaataggtgtggtgtggtgctgaaaaaaatgtatattctgttgatttgggatggagttctgtagatgtctattaggtctgcttggtgcagagctgagttcaattcctgggtatccttgttgactttctgtctcgttgatctgtgtactgttgacagtgggtgttaaagtctcccattattaatgtgtggagtctaagtctctttgtaggtcactcagatgattggcacttactgggcgcttggcactttccatactgtgtcatcggcagatagctgcatggttggtgttcgtgctggggaatgggaagttcatcggtgggacaagggacaaaatgcccccattgctttgttgtggctttaatctccctttcgaggctgagccacagcgtgctgtaggtggcgctgctgtgaagcgcagtrccagggtcacactccactcccagctctgcagaggtggagaaagaatgaaacatctcactcctggacttccactttcctgtcactgttggtgtcacctcttactggatgtcacagagcccagcccctcccacctgtscctaggaaaagcagatgccaccttggaatgtggggtttgtgtgtgcaatttactagctgggcagagaccagcaacctggagagcaggtgtctcrtctaaggggacagtcacatttcacctccagccacctggaggaatttgggcctggtgatgtcagaattcttcaataaaagcctaaaatctatattttatgtgcggtcatgagatctgttaaatgttagcaacttcaggaagtttaaaaatgctgtgtggacctagaataggcaagttcttaaaggcagaaagtggaatgctagtttccagggactggggaacagggaggaatggggagttcatgtttaatgggcacagaggttttgttagggatgacgaaaaagttcgggagatggtgatggagatggagatggtgatggtgatggtgatggtgatggtgatggtgatggtgatggagatggagatggtgatggtgatggwgatggtgatggtgatggtgatggtgatggtgatggtgatggtgatggtgatggtgatggtgatggtgatggtgatggtgatggwgatggtgatggtgatggtgatggagatggtgatggtgatggwgatggtgatggtgatggtgatggtgatggtgatggtgatggagatgggtgatggtgatggttgcctaacatcaggaacgtgcttaatgcttctgaattgcacacaaaaatggcaagtttaatattatgtgtactttatcacaatgaaaaaagctgctgcgtgggccaagttacttgtgcaggtaagtgttctgcaggtsgttgcctgcacctcagttgtagggtgtccgtaggatgtgaggccagtccccgggcttaatgatgctttaaatcctgcctagtattcaattatttcttgtcgcttaaaaggcctaataaaattatggtyttagtttacagtggtatgaatgcttagctgttggattttagtaggaaagttygtccctttttgtttttaattttgttttacagattcacaggaatttttttttttttttttttttaatgcacaraaagtttccctggacwcwctacccagtttcccccagtgataatatctkgggtaacatcctgtatacwttcacattggtgcattcctcaragttgtcagattttgctagttttacgtgcacttgtgtatgtgtgtatttgcaattttagcacgtgtagactcttgtaaccactacaatcaagttacagaactacactaccaaggttcatctttttaaaatctttgatgttacctttttyggaacagtgaccatgagaggactttcctcccaaaattttgaraactactgaaccagaatatagtctgacactaataggtagaaatttaaccaaaggagattatgaagctctgcacttsagttaacaaatcacttctcagcttccagttccatctcagaaggaaggaaagggattaaaatccagagaccagaaatgggagcaaagtayaaggtggtgtaatcattacagaggtttcctgatgtttccaagtcagtcgtgtgttgagctgctaaactctaaagtaattttaggtggaagtgttggaaacatgctgctgaggtgatagaaaggaatccatggtcctctgttagttggaaagtatatggaatactatattctacataagatacaayactctctgtgagacaaggataaagtagattttgtcagtgaaattgtgacaagaatcgctgatgggtttagagcctaagtttgcgaggagcactggaagaaattaagattgttgagattggaaagggttagctatggggggaacaggaggaggtgactccatgacagaccaaatattcaaaggactgtgtagaagaggaaaaagactttgttagggctccagaggacagagccaggagtcagacagggccttgaactcaacccaccgagatctgcaaactttgcaggatgcaccagatgtcttgtagccatgggtcaaggggggaccctgggtaagagactgtaatagatgacctctaaggccatctcatgacatgtgtgattaatgtatgtacctgtcctctctttttgacaattctacagattattcaggacaggkagttgaccaactgcaaagagtgattgacaccatcaaaaccaaccctgacgacagaagaatcatcatgtgcgcttggaatccaagaggttgaaagaaccccgtcgtcttcatttatactaaccatactcttagagggaagcaatctggttttgtgcagaggcacctgagggaggcaggaccctgggaacttcccccagccacatggttgattgtgtgacgttgggcaagtcacattttgctgcactttcaccttcagatcatgaggttgggcccagaggattttttttttttttttttttttttgagacagagttttgctctgttgcccaggctggaatgcaacggcgtgatcttggctcactgtaacctctgcctcctgggttcgagtgattctcctgcctcagcctcccaagtagctgggattacaggcatgtgccaccatgccyggctaattttgtatttttagtagagacggggtttcaccatgttggtcaggctggtcttgaactcctgacctcagatgatctgcctgcctcagcctcccaaccagatgatcttaakttgtgtatttatactcattcttacacmaaaaagggytttaaattgcctagaaactacatgtaagatgttaacattttaaatggaagcagatgaagttccagctcgctgccacctcactaacatttttaacaattatattgtaaaattcaactctaccagggtgtagagccaggtgtggtggctcacacctgtaattccaacaactccagaggccaaggcgagaggatcatttgaacccaggaatttgaggctgtagtgagtcatgatcacgccattgcactccakcctgggcaacagagtgagaccctgaatatttaaaaacaacaacaacaacaaaactctatcaggatatcataagtacttagagtgaaatacttgcatctgtaatagagacttattttttttttttttttgagacacagtctcaccctgttgcccaggctggagtgcagtggtktgatctccgctcacggcaacctccwtctcccaggttcaagygagttcccattcctcagccccagagctgggaccacaggcgcgcgaatttttgtatttttagcagagacggggtttcactatgttggccaggctagtctcraactcaagttggcctcaagtgatctgcccaccctggcgtcccagtgttgggatttcaggcatgagccactgtgcctggccatgtaatagagacttttaatataggagggtgtaccagaagcaccagtttcctgtggcaaacagaattattcctgctgtatttgtaatytggtgccacgaggtagcccagatcccttcagctctgatggaagagcattgcttcagccgtaaatggacacctgcagaaaccttgcaccgatggatagtctccctcagctccgtgccatcgctgcagrggctgttatggacatcactgcagcccagtggctctctctcctggtctccaccatatgagttggcttctgtttctctcctgttttactttgcctttagctgtggtctttcaaaccaccatccctccttatcttcctctgctggttcctcagatcttcctctgatggcgctgcctccatgccatgccctctgccagttctatgtggtgaacagtgagctgtcctgccagctgtaccagagatcgggagacatgggcctcggtgtgcctttcaacatcgccagctacgccctgctcacgtacatgattgcgcacatcacgggcctgaaggtgggctgtctcgggaagggygacttgccagcctaccacactgagctcttcagttctttaatatgggaaaacaaattgcagagtttagtctctgattagcttttaaatttgatatgtgtaagtaagamatgaaccagcttttactttgaaaccttcctyttctggaaggttttctggccctgyggtataygcactaacagatctatacaggttgtttgtgatacagcttctatggatyttctcaaaagctatgctgaggttgggtatggtggctcatgcctgtaatcccagcactttggragactgagacaggagcaattgcttgaggtctggagttcaataccagcctgggcaacataacaagatgctgttgctacaaaaaaatggaaaagctacactaaattatttttttaaaaaaagccttgcggtgtctgcatattctaatgtttttaaatgatgttttaaagaattgaaactaacatactgttctgctttctcccccgggtttatagccaggtgactttatacacactttgggagatgcacatatttacctgaatcacatcgagccactgaaaattcaggtaagaattagatgttatacttttgggtttggtaccttctcttgataaaaggttgactgtggaacaggyatctgctcaatgctgtgtccaagataaagatgactgctccaaatgtggggcttcagtttagggagaagtggtgggcaggtgggcaggacaaggcaggcatctgcctcagcaaccatgggcacttaacwtgtcaggtgctgtgaggtactaagcaccagtaccagagagggaagagccacattcaagccaggggattgtccaaaaggrggcattttaactcattttaacttgaaggagaattgaagtgcaaatgtttttccttttcttttttttttgagatggagtctttctctgtcggccaggctggagtgtgycgtggtgcgatctcagctcactgcaacctccacctcccgggttcaagcaattcttctgcctcagcctcccaggtagctgggattacaggcacatgccaccacacccagctaatttttgtattattagtagagatggggtttcatcatgttggccaggctagtctcaaactcctgacttcaagtgatccacctgcctcagcytccgaaarttctggaattacaggcataagccaccaccctggccataaatattttttgttaattttacattaagtacaatatttaggtccaaacttcaaaagtctgttgaaatccctaagttatagcagccaacaattgatatgaaatggcaataaaaatgtaagttcatctgcttcatgagccttaaggaaaaaaactcagaaccagacactttttagccccttccaggttagatccaggttttaaaagttaytcctttgagggagtttggctgcttttgagtggaggtgacttcaggcttattctctctggctctctgctctggtcrtttttagacatagtaataggttgtgacctgtcttcacatcctaattgccactgtctgttcatcccaggaatcctggctttcatccctttctgttcactgtccatgcatgtcatctttccttctttctgccagggacagatgggttagggattgtggaattcaagtaaacgtagagctactatgagttacagattgactgtgttcctgtctttaataaatttgccaagagtggttataagaacttacacctgatgaggcaccaggctcctgatgctgtgtaatgtcacaaaatacccctcactctcgatctgtgcaagagaacagctggttgcgctccaatcatgttacataacctacgssaaggtatcgacaggatcatactcctgtaaaatagaactttgttgatcacatcctgtgtacttgtttcayggacatgaggagcaattacaacaggtcgtacaattatggcaaartaatggccttattttgtttttagcttcagcgagaacccagacctttcccaaagctcaggattcttcgaaaagttgagaaaattgatgacttcaaagctgaagactttcagattgaagggtacaatccgcatccaactattaaaatggaaatggctgtttagggtgctttcaaaggagctygaaggatattgtcagtctttaggggttgggctggatgccgaggtaaaagttctttttgctctaaaagaaraaggaactaggtcaaaaatctgtccgtgacctatcagttattaatttttaaggatgttgccactggcaaatgtaactgtgccagttctttccataataaaaggctttgagttaactcactgagggtatctgacaatgctgaggttatgaacaaagtgaggagaatgaaatgtatgtgctcttagcaaaaacatgtatgtgcatttcaatcccacgtacttataaagaaggttggtgaatttcacaagctatttttggaatatttttagaatattttaagaatttcacaagctattccctcaaatctgagggagctgagtaacaccatcgatcatgatgtagagtgtggttatgaactttaaagttatagttgttttatatgttgctataataaagaagtgttctgcattcgtccacgctttgttcattctgtactgccacttatctgctcagttccttcctaaaatagattaaagaactctccttaagtaaacatgtgctgtattctggtttggatgctacttaaaagagtatattttagaaataatagtgaatatattttgccctatttttctcattttaactgcatcttatcctcaaaatataatgaccatttaggatagagttttttttttttttttttaaacttttataaccttaaagggttattttaaaataatctatggactaccattttgccctcattagcttcagcatggtgtgacttctctaataatatgcttagattaagcaaggaaaagatgcaaaaccacttcggggttaatcagtgaaatatttttcccttcgttgcataccagatacccccggtgttgcacgactatttttattctgctaatttatgacaagtgttaaacagaacaaggaattattccaacaagttatgcaacatgttgcttattttcaaattacagtttaatgtctaggtgccagcccttgatatagctatttttgtaagaacatcctcctggactttgggttagttaaatctaaacttatttaaggattaagtaggataacgtgcattgatttgctaaaagaatcaagtaataattacttagctgattcctgagggtggtatgacttctagctgaactcatcttgatcggtaggattttttaaatccatttttgtaaaactatttccaagaaattttaagccctttcacttcagaaagaaaaaagttgttggggctgagcacttaattttcttgagcaggaaggagtttcttccaaacttcaccatctggatactggtgtttctttacagattcctccttcatttctgttgagtagccgggatcctatcaaagaccaaaaaaatgagtcctgttaacaaccacctggaacaaaaacagattttatgcatttatgctgctccaagaaatgcttttacgtctaagccagaggcaattaattaatttttttttttttgacatggagtcactgtccgttgcccaggctgcagtgcagtggcgcaatcttggctcactgcaacctccacctcccaggttcaagtgattctcctgcctcagcctcccatgtagctgggatcacaggcacctgccaccatgcccggctaattttttgtattttttgtagagacagggtttcaccatgttggccaggctggtctcaaacacctgacctcaaatgatccacctgcctcagcctcccaaagtgttgggattacaggcgtaagccaccatgcccagccctgaattaatatttttaaaataagtttggagactgttggaaataatagggcagaggaacatattttactggctacttgccagagttagttaactcatcaaactctttgataatagtttgacctctgttggtgaaaatgagccatgatctcttgaacatgatcagaataaatggccccagccacacaattgtagtccaaactttttaggtcactaacttgctagatggtgccaggtttttttgcacaaggagtgcaaatgttaagatctccactagtgaggaaaggctagtattacagaagccttgtcagaggcaattgaacctccaagccctggccctcaggcctgaggattttgatacagacaaactgaagaaccgtttgttagtggatattgcaaacaaacaggagtcaaagcttggtgctccacagtctagttcacgagacaggcgtggcagtggctggcagcatctcttctacaggggccctcaggccacagcttaccttgggaggcatgtaggaagcccgctggatcatcacgggatacttgaaatgctcatgcaggtggtcaacatactcacacaccctaggaggagggaatcagatcggggcaatgatgcctgaagtcagattattcacgtggtgctaacttaaagcagaaggagcgagtaccactcaattgacagtgttggccaaggcttagctgtgttaccatgcgtttctaggcaagtccctaaacctctgtgcctcaggtccttttcttctaaaatatagcaatgtgaggtggggactttgatgacatgaacacacgaagtccctctagaggttttgtggtgccctttaaaagggatcaattcagactctgtaaatatccagaattatttgggttcctctggtcaaaagtcagatgaatagattaaaatcaccacattttgtgatctatttttcaagaagcgtttgtattttttcacatggctgcagcagctgccaggggcttggggtttttttggcaggtagggttgggagggccattttgtcactgcctcagctgggcatctaggaagcattagcactgtgaggctttctcggtacactttgtacctggaaaacaatccgaacaggtccatgggaccacaactgagggaggtgggacacacccacctccatccaagaaccaagacatctaaggaaccaaacccagatgcagaacaataaaatacattccatactccccacccaaaaaataaaatcaccaaatgaggttcctttcagctatacaaatgatttagatgaagagcagaggatttagaatcaggtcaatctgtgttcaggttctgcgtcagccactttgtagttctgaggcttggggcaagtgaccgagctctgctgcctgacttccatcgcctgttattgaacagctgtgacaggcaggctgatatggtttggatttgttttggatttgtgtccctgcccaaatctcatgttgaactgtaatccccagtgttggcagcagggcctgctgggaggtgattggatcatgggaagtggtccttcatgaatggtttggcacccgttccttggtgctgttcgagatagttatcacaagatctgttgtttaaaagtgtgtagcaccttcccccctcactctctcttcctcctgctcttggccataagaagtgcttgttcccccttcaccttccatcatgattgtaagtttccagaagctgagcagaagccgctatgcttcccgtgcagcctgcagaactgtaagccaattaaacctcttttctttataaattacccagtctcaggtatttctttatagcagtgcaagaatagactaatacagtataaaatagttcggctatattaaaagacagcacctgtctactcactacccccctgaagagaaaaacggttaccattattactgaagcctcctatgtaccctcaagggtcccatttatcactcacagtcctgaatttggtgtttccctttcccagtgaatgcttttgtgcctttgctatatacttgcagtgatctttctgtgagacatttaattccaggagacaagaaaagtggaataagcaaaaccctacgtgtgcagatgactggaaggagattgtcctaatttaaaagcccacctggggcgttctgagaaataagatgaaataaatgtgtgtctagaccatggaagactccagtactgggaagaggagatgggacagaagtacagaatacacgtgatgaaaacaggagctggttaagggagtagtgtggctgcaagccttaccttcaatgtacttaaaaaataaagtgagtcagctaccagaccctatcttaggaggcaaaatgaccgttcattggtgggtctctgtgaaagcaaaaccaactccgcctgagagttataggacatgccagcggacaaggtcttagtgtgttctggtcatgaaggcagaatttacaagctctggcctggattgagggaccctactgaaacagaaagtattaatgccacattactgacctattttcaaggcttgcagaaactgatatgtagtcaaatataatcaggtgctgcaccagttcacagaggccaactccaccagcatgggggcaaacaggaactaaaaggaaatcgtttctatttaataccaagagtagggcagggagaggaaggggtgaaagggaactttctggtttttcttattgcccacaggtgattaaatcatttattaatatttaggaaggaaattccaagatgaaaatcatcaaaaattcccggattaaagctaaatgagagttagaaaaaaatcgaaatggcaaactacagactcccatgcatgtgaattgcaaaccatcaagggaggtgtctgattagtggggaaatgaaggtctggtctgcagccgctgcagcacgcttactttcaaactttttggccatcagcaatactgagaggttctcattgacactgcccagtctgcaactgtcaatctggaggaactgcagggccttcgcctgtaggagttgcttaaatatcactctattgtggcactggaaatagaattgaaaataacaccaacagaagagtcagccttggccttcaggatctctaaacctggcaacgcagccactctatgccaataattattcatcagtggccgtcaggaagcccagactgtatttcttctttgttctcgctgggcatgaggcgagcttttatagcgtgggcagggaccttgtgctcacttctttacaaatctgctaatgcaacagtgtgagtcaggtcaaaatcacactggctcgccatttatgagggaatgactgtcacagcgactgataagtgggagatgaagcatcaggatgaaatacggtgacagtgatgagcaggtggcacagatgacaacacggaaccacggcagagcagtattgctccttttgccgggaaaactgagaatcagctcctcacgctgctctgctcgtgggctgactgcagcaggttttggcaggcactcgggcttcatttataagctcaaaaagtgaacgcagtcatgtttattcaatttgaaagctggctttcttaagaccattttctgcccttgcaatagcaactttaaattgctgccttttcaatttcaattagacactttgaaaaagatacccgaccttagtcatataaattggagaaatagccacaaactttttctatatctgactctagactctgataaaatgacccagtttctaagatgatgaaaatttcccaactcaaagtacagcaggtgatggagcctaacacacaactgtgtcctcggtcactggtcagcgtgtactgaccccaaggggacgtcatccacctgttgggggcgtcactcacctgttctcctgtggcaatgccaattcctaatgggaccagtgcctataaaatagaaggcagcctggtgttattttcctaagttttgaactgcaactcctaatgtttaaaaacatttatagctgaaggaggaaacggccctgctgttaagccatgtgaaggctcaagactggcaaaggatgtccaggggaacacatgcgtgcgggagggctctgtgtatctgcagaggagaaggtgagcactgctgagctgccaccaccagccccgttcctgaccagggctctgcagatctccttctgcggtgtcccggcccatgctccagctgcgctcctcccaacgtggacagcacctccctctccagcctgcgcagtggcataaggacagggctattcggagtggctcattgtggactcacagggtccaacctttggacgactccttcctgtgggtcatcactccatcaattcccttcttcttgcctccctgagaaacctccttctagaaccctctcatatctttttttttttttttttttgagaccgagtcttgctctgtcacccaagctggagtgcagtggcatgatcttagctcaccgcaacctccaccccccaggctgaagcgattctcgtgcctcagcctcctgagtagctgggattagaggtgcacgccaccatgctggctaatttttgtatttttaatagagtcagggttttgccatgttggccaggctggtctcaaactcctgacctcagatgatcctcccgcctcggcctcccaaagtgttgggattacaggtgtgagccactgcacctggcctcatgtctttgttgattccaaaatcctcttccttaaggcaggaaaaatccatgaaaaaaaaaaaatcctcttccttccagctcagtgggtggcctcagacctcaatctgcaggttaggctgagaccattgctcacctggtagagtcctcacctggtgaggtactggactctgcacctgaacacagccctgctgctctctgt

SEQ ID NO: 94422 - DNA, 63322 bp, Homo sapiens
  misc_feature (1)...(63322): n = A,T,C or G
tgtgacatgcagtgctgttcagcattttacccacagaagaactttcaaatttgaatttctttcaaaattagagtcaatcctgtcaaattctgctgctgttttatcaacagttccatagtttatgatattctaaatcctttgttgtcattcaacagtgttcacagcgtcttcaccaggagtagtttccatctcaagaaaccactttctttgcttatccataagaagcgactccttgcccattaaagctttgtcttgagattgcagcaattcagtcacatctgtgggctccacttctaattctagttctcttgctattgccaccacacctgcagttgtgtcctgaactcaagccttgaacccttgtgggaaaagacttgttgccagagcagtcagaatacacaaaacattggagttagctgttttacacgggggtggttagtggcaccccaaaacaactaaaatagtaatcatagatcactggaacagatataatagtatttaaaaagttcaaaatattgtgagaattaccaaaatgtgacacagagacacgaagtgagcacatgctgttagaaaaacagaactgatggacttactaacccagggttgccacaaaccttcaatttatatatatatatatataaatatatataaatatataaatatatataaatatataaaaatatataaatatataaaaatatataaatatatatatatagaacgcaataaaatgaggtgtgggtgaaaagaaaactgaggtttgcagacatcatacagctagctagtaacagctgggtttcaaaacacctctgactttacaaccactaattttatttattttattttgaggcagggtctcgctctgtcgcccaggctggagtgcggtggcacgatcacagctcactgcagcctcgacctcctgggctcaagcgattactcccgcctcagcctcagacagcaggtgggataccaagnnnnnnnnnnnnnnnnnnnnnnnnnnnnnnnnnnnnnnnnnnnnnnnnnnnnnnnnnnnnnnnnnnnnnnnnnnnnnnnnnnnnnnnnnnnnnnnnnnnnnnnnnnnnnnnnnnnnnnnnnnnnnnnnnnnnnnnnnnnnnnnnnnnnnnnnnnnnnnnnnnnnnnnnnnnnnnnnnnnnnnnnnnnnnnnnnnnnnnnnnnnnnnnnnnnnnnnnnnnnnnnnnnnnnnnnnnnnnnnnnnnnnnnnnnnnnnnnnnnnnnnnnnnnnnnnnnnnnnnnnnnnnnnnnnnnnnnnnnnnnnnnnnnnnnnnnnnnnnnnnnnnnnnnnnnnnnnnnnnnnnnnnnnnnnnnnnnnnnnnnnnnnnnnnnnnnnnnnnnnnnnnnnnnnnnnnnnnnnnnnnnnnnnnnnnnnnnnnnnnnnnnnnnnnnnnnnnnnnnnnnnnnnnnnnnnnnnnnnnnnnnnnnnnnnnnnnnnnnnnnnnnnnnnnnnnnnnnnnnnnnnnnnnnnnnnnnnnnnnnnnnnnnnnnnnnnnnnnnnnnnnnnnnnnnnnnnnnnnnnnnnnnnnnnnnnnnnnnnnnnnnnnnnnnnnnnnnnnnnnnnnnnnnnnnnnnnnnnnnnnnnnnnnnnnnnnnnnnnnnnnnnnnnnnnnnnnnnnnnnnnnnnnnnnnnnnnnnnnnnnnnnnagatggggaagcctctcaaagtcgtgactctgcagaatagtttctgacgctgccctggtgtgcggtgaaagtgagggtgtgtcctggggcgctgggccaggctggaggtgcaggagattcctttgggcttctcagtggtcgccgtggaagggagcggggaagaaggggagggatggagcgacccttcttggggttgccaagcggcgttcgccgcccttcgtcgtccttcgcccttctcttgccccttgcctttgttcgaccgcccctttggtaccagttttagttttgtcccgaggcagattgtaaacctttttgcttcgttttcgtttcatcagacgttgcattggatttctgtatccgaaacgtggtgtgagctttcagaagtagatgaatacacatatccccggggtgtcatttcttgattggcgtttgacaagggcttgtattgtttgcttgctgacagtccagggtactggccagggatcacttttacttagggaatggaccttgctgctccctagccttattcaaaatggcacctaaaatatgtgtggtgtctccaattggctgtaggtgtgtgattcgttgaccatccctgtttattctgttacagttcctttattgaagattcagcatttacaaagcatgatacgaatcaagagtattgtttgatctcaaggtggattcttgatggtctagaatcttgaatcgaattcttaatgattgcccaacccctttctaaagccataacaacagtagaatggctcttgaaatattctaatacttaaacacaccagtagattcacacacataaaacaaaacccctctgtttcctcaaaatgccagcgctgaccagagtttcttttttaaaatttgagctttatcttaaatatttaatcagatcttttcctcatcccccaaatgaaggaactcaagtagatttctaaggtcccttcctttgacctctccatattgagaatctgtattttgagggtcagcaaaaagctctatattaaaatgaagagaacattttaagtactatttcataagatttagtagaaaattaagtatctagtctgagcgcggtggctcacgcctgtaatcccagctctttgggaggctcgaggcgggcggatcacttgaggtcaggagttcgagaccgcctggccaacatgttgaaaccctgtctctactaaaaatacaaaaaatcagtcgagagtggtggcaggtgccggtaatcccagctactggggaggctgaggcaggagaatcgcttgaacctgtgaagcggaggttgtagtgagccaagatcgcgccattgcacttcagtctgggtgaaaaaagcgaaactgggtctcaagaaaagaaaaaaagaaaattacatatctagattattaaatggttaaggataagtgcagttaaaaattaaagccaggggccatgatgtatgcttttaatcccagctactcgggaagctgagttgggaggatcacttgagccaaggagttagagggtgctgtgatctgtgatcacgccactgcactccagcctgggtgacagagcaagacccccgtctctaaaaataaacacacacctgtgcctcttatagagttagggttttgtacatattgctttgttttaatcttcaacgtaatcctgtgatactggtataattcctcttgtaagcatgagcaaaaagttttaagtaacttgctcatggcaatagcacaataaatttcaggtaggttcctctcctttacttctagtactgttttggtttaatcctgtagcatctttagcttgtactattgtaatatgcttctagtttattttagtgattacagtatgccttcttcaagcctgatttctctgctgctgcaagtgatctaatagtattcaaaccagactaaagtggcctttatgacagcctttcaggaattacacattgcctacaacataaagcctttacgtattttattttatttttttttattttttgagaccaagttttgctcttgttgcccagtctggagtgcaatggcgcgatgttggctcactgcgacctccacctcctggtttcaagcgattctcctgcctcagtctcgcgagtagctggaattacaggcgcctgccaccatgcctagctcatttttgtatttttagtagaaacgaggtttcaccgtattggccaggctggtctcaaacccctgacctcaggtgatccacctgccttggccttccaaagtgctgggattacaggcatgagccaccattcccggcctctttatgtatgatttaggatgacttatcttccataatttgatccttagccagcttccagtttcatctactgctgctttcccttcactctggtaattaattacttacatcttagaacacaccatgctgctttatgctgtggaatgttttccttcttttctgggaattcttctgtcctctcctagtctctgactaacacctaatcttttcttgagattcaaaattgatagtgataactcagaagttaacacttcatccaggaaatctttcctcatttatgaagcattccactttgttgctgtagcctttgtaatacttacatagttaattactctagcctcctcccacccccccattaggctgtaagtttatggagagtcttcccaatgctttgtaccgggcttgtcattaaatgaatactcaacatattaattgaactgatgatagagttgggatttggtgtctgagtgaggttttcaaattctgatttcaggagttggaaagcaattaacagttgtgaggttcttatttttgagaaggtataaaattttcagtggaaacaatatatatccttgggttttaaaaatatatatttcaaaagttagctattttatgaggctgattgaaattttttattgtggtaaaatatatgtaataaagtttaccattttaatgatttttacgtatacagttctatagcattaaatatattcacagtgttttgtaactgtcaccttcattcacatcctcttgcaaacaccattctctttttgtatgtatgaatttgaccactttaggtatctcatataaccagaatcatccatgttgcagcatgtataagagtttctttcctttttaaggttgaataatattccgttgtatgtatataccacattttctttgtccattaattggttgatggacacttgagttgctcccactttttcggctgttgtgaataatgctgctgtaaacatgggtgtacaaatatctgtttgagtccttgctttctgatcttctgggtatacccagaaatgaaattgctggatcatatggtaattctatgtttacttttattccccccagcagtgtacaagtgttccagtttctccacatctttgctaacacttgttattttctgttaaattttaaaaagaatagccattctaatggctgtgaagtgggatttctatatatttttaaatgatttagatatgtctttggattttttcttaattgagcacctcttgttcagaaatgacacttttcaattctcccagatttcttatgactcagaatctgtattccttaagttgttctagatgtgctttattctcccaggaatttttcttcttctcttaaactatctaacctttctctctctctcttcttttccaatgctgtgtgctgatgtgaatgattcttcaattaaacacatgggggctgcgaaacttatcattttgggaaatatttcaatatgatcatattgttggagtaggattcagaagacttgggagtttattaaccaattttatgacattagcaaatcaatctacttctctgaagtctcagtttctttttttttttttgagatggagtctcgcactgtcgcccaggctggagtgcagtggcgtgatcttggctcactgcaaccttcgcctcccgggttcaagcgattctcctgtctcagcctcctgagtagctgggattacaggcgtgcgccaccacacctggctaatttttgtatttttattagagacaggctggtctcgaactcctgacctcatgatccgcccgcctcgacctcccaaagtactgggattacaggcgtgagccaccacgcccagcctgctgaagtctcagtttctttaactatgaaatgagaagttaggtttgatccagtgaaattttattcagcacctactgcatgcatgctcctcttgattaggtaagtgttatgggcatagaaagatgaatgacatgttttgactcccgataactgcctaattggtgatcttctaagggtctgtaaatcttgtcttgttattttttaattaaaaaaattgtgattttgtttgcagttactgtaaaatggggaaaggagaaatttgaaggtgtagaattgaatacagatgaacctccaatggtattcaaggctcagctgtttgcgttgactggagtccagcctgccagacagaaagttatggtgaaaggaggaacgctaaaggtaaaatgtagtccaaattttcatcacattactattattgtatactttttgaaaaataacgccagaaaattatttaattttaatgtagcatttgaagtgctttttttatatgatgagagtatgtcagctatggtgttaaaactgtcttatgcctgttagagtaagggagaaatattgtagctgtttgacaacactatatggtattataaaaacatcgttttaaaactctttttacttttgtttatttttaacttttaggttctgagatacatatgcaggtttgttatataggtaaacttgtgtcacagggtttcaatgtacggatttcatcacccaggtactaagcatagtacccgataggtagtttttttttttttttagatcctcttcctcctcccactctccaccctcaagtaagttccagtgtcttttgttcctgtctatgtgtctatgtgttctcattatttagctcccacttacaaaagagaacatgcagtttgcttttctgttcctgcattagtttactagggaactagcaggtaatgatctccagctccatccatgttgctgtaaaggacatgactttgttctaaaagcatcatttaaattttattttaaaatgtgttgtattaccagatacctctgtgggtcaggagagtggaacactttacagttayctgtattgtgtgaattttttttcctatgaggatgtattaaaagtattagttttattttgtttagactaaaatgaaaccaattaatatttccttagtaattttctgtaatgaggttggaaaattttatctcagtttaaaaatgtggaacaatacasataggtttgttttcttaaaaaaactactacagaatgtaattttgtacatgcatttgtatgttgaaattcaaagcacttcagcatttttaccaaagccctggttctggaaaactgttcatttttttttttkggcctttattgcwtcctacccattaacgaagagctgtttttctttttctttttttttgagacgagtcttgccctgttgcccatgctggagtgcagtggtgctatcttggctcactgcaacctccgcctcctgggttcaagcgattcttatgcctcagcctcctgagtagctgggattacaggtgtctaccaccatgcccggctaatttttgtatttttagtagagatggggtttcaccatgttggccagtttggtcttgaactcctgacctcaagtgatctgcccaccttggcctcccagagagctgggattacaggcgtgagccactgcacccagcccccttttttctaaacagtaattgttacctaactcctacctggagatgggaggaaaaaatttttgtttaaaaagagaagaaacctaatttttgtctttacttcctttggaatgatctcagtgaccacagttaagaatccatccctgccagcatcattgatgaaggactgcagaaaagacaagaagatatctattattattattattttttttgggattgagtctccctctgtcactcaggggctggagtgcagtggcgccatctcggctmactgcaaccaccgcctcccgggctcaagtgactgtcctgcctcagtctcccgaatagctgggataacaggtcaccrccaccatgcgtgacaaatgtttgtatttttggtagagacagtgtttcaccatgttggcgctggtctcgaactcctgacctcaagtgatatgcctgcctcgggcctcccaaagtgctgggattacaggcgtgagccaccacacccggcctctattatttttaataatataagtatagctttaaaaaatacttccttcaagggttagataaaatgctaaagatctatagttaactttagagataaagacaggctacccccactgggcagtaaaacacacgttggaggaaaatctttgtttacccccgaaggtacagtatgaacctttggcctttagtgaacttcatagcctaatctatgctgaacactgtactagtggtatgctgtcgagaattatagaagtatgcraattaaatgaaactgtgactgctaatggttaccatttattgagtacttattttatgtcaggcttttattatattttctttaattctcagctgtatgttatccatatcttatatatgaggaaattttataaatgagtgtcaaagaggtttaagtaacatagtaaggcaccaaaagagcatatgatttatacatcaagcagatctgtgttcacttcccagttttgtgtgaccttgggtaagtgatcttagggggcatttatagttatcattcattatgtttagcagtcatagaccttaaattgagaagggcctttaggaagttaccgttccattttaaagcagataaaagagataattagtggcaccaatgaagggtagacaagcatattgggtacccgataccttctataaaagggagtaatatagaatcgactttatcctatgaggggaaaggcctagctgtagttagtaaaaatattactctggactaatcatgcatttaaaaaaaaaattcttgatttttattcaacatattgaaaggaaagtatatacttgctttatagatgcgttatagacattaactcttcattcttgccacgtaagcttgttatttattagctctgctggttccaaacatccaaaaaataggatctatcatttgtcattagtcaagtgttttttagtacttgctaaaagtatttttttatacttatgtgttttttagtatttgatgctgtaaatacaggttactgccttttgtattgtgttaccttaygcagttgaagcaaattatttgaaaccctggctttagtaccacttgtgtttaaaaaaaatttttgtttttttttgagatggagccttgttctgttgcccaggctggagtgcagtggtgagatctcggctcactgtaacctctgcctcctgggttcaagcaattatcttgtctcagcctcccgagtagctggaattacaggtgtgcaccaccatgctcagctactttttgtatttttagtagagatggagtttctttatattggtccggctggtttcgaactcctgaccgcaggtgatttgcctgcctcagcctcccaaagtgctgggattacaggcgtgagccactgtgcctggccaaaaaaaatttttttaattgccataattttaaataaaatctgcatataggataaattttattctgttttgaagtacattaaaataaattgattattagattgtgttcagcttgtacagtggtggttaaatgtcttttgtttgtctttgaaacaggatgatgattggggaaacatcaaaataaaaaaygtaagtattatcttatgaacgtttattataatgcagtaacctcattatgataccaaaatacattccagatgactttttttcatgtgtatatccagttgttccagcactatctgttgaaaatacttaccttttcccattgacttgtgttgggctctttcttgaaaagtagttataggtttgtttttgggtttttgtttcattgatctagtagattaaagttacactagtaccaaatggttttgattactaaagctttataataaaagccttgaaaaaaaaattagctgggtgtggtggtgcacgcctgtaatcctagctactcgggaggctgaggtgggaggctgaggcgggaggcagaggcaggaggcaggagaatcacttgaacctgggaggcggagattgcagtgagccgagatcgtgccactgcactccagcctggcaacagagcgagactccgtctccaaaaaaagagtcttgaaataagatagtatatgttcttatgctctccaactttctcctctttgagattttgtttgagattacattgaatctgtagctcaatttggggagaataaacatcttaacaatattgagtattaaaatccctgaatatgatgtacttccttatttatttaggtctctgtttttctcttagcagagttgtagtttttaaacatagaggttttgcatgagtggttttttttttgagacagggtytcactctcacgtatgccggagcacagtggcatggtcatggctcgctgcagctttaaactcccagcctcaagcagtccttccatctcagccttccaagtagctgggaccacaggcgggtgttaccatgcccagttaattaattaattttaattattttttgtagagatgggggtgtcactatgttgcccaggctggtcttgaactccagggctcaagcgatcctcctgccttggcctcccaaagtgctgggattaacaggtgtgagtcactgtgcccagcccttgcatgacttctcttaaattattggaacttaacatttgttcgctgcttaaaataatattaaaaaatatttccagtgttcatggctagaatgtaaaaatacaattgatttttctctcttttttttttttttttttttgagacagagtctcactcttattgcccaggctagagtgcaatggcgcgatctcggctcgctgcaacctctgcctcccgggttaaagcaattctcttgcctgagctgggattacaggcgcccascaccacgcccagctaacttttgtatttttagtaragatggggtttctccatgttggtcaggctggtctcgaactcccgacctcaggtgatccgcccaccttggcctcccagagtgctaggattacaggcgtgagccaccgcacccggccaaaatacagttgatttttctaagtttattttcattctttattcttgtaagcaattcacttactaattccagttgtgttttgggcagattccaytgggttttctgtgtacataaacgtgttatctgcaaataatgacaattttacttctcccttttcaatattcrtgactttcagatttcttaaactttattgacatataattgataagcaaatgacttcttttttttgagacagagtcttgctttgtcgcccaggctggagtgtggtggtgtgatcttggctcactgcattatttgcctcctgggttcatgtgattctcctgcctcaacctcctgagtagttgggattacaaacgcctaccaccatgcctggctaatttttgtatttttggtagagacagggtttcgcaacgttggccaggctggtctcgaactcctgacctcaagtgatctgcctgccttgatctcccaaagtgctggaattacaggcgtgagccactgtgccaggccttgtcctactttttaataggacttctaatacagtgttaatagaaagtgataagagtggccgggcgcggtggctcacgcctgtaatcccagcactttgggaggccgaggcgggtggatcacgaagtcggagatcgagaccatcctggctaacatggtgaaactccgtctctactaaaaaaaaaatacaaaacaattagccgtgcatggtggcaggtgcctgtagtcccagctactcaggaggctgaggcaggagaatggcatgagcctgggaggcagaggttgcagtgagctgaaattgtgccactgtactctagcctgggcaacagagcgagactccatctcaaaaaaaaaaaagtgataagagtggacatcttggctgggtgtggtggctcacacctgtaatcccagcactttgggaggccaaggatggtggatcacttaaggtcaggagttcgagaccagcctggccaacatggtgaaaccccgtctctattaaaaatacaaaaattagccgagtgtcatggtgcacgccaagagaattgcttgactttgggaggcggaggttgcagtgagctgagatcacaccactgcactccaacctgggcaacagagcaagactctacctcaaaaaaaaaaaaaaaaaaaaaagagtggacatcttgtcttattctagttcactacaacttaaaattatgaaagaccgttacattttgttaagtgttttttctgtttgttaaaatgatggtgtgatttttttttctttttttctgttggtagtgtggttaatctcattgatttttaacttaaaccgtgcatttctgggatgtgcagttctcaaatttcttggttttgtgacccttttgccctcttaaatattatgattgaccccagagtttcatataaaggcacacctcattttattgtgcttcacagataattgtgatttttataagttgaaggtttgtggccaccttgcatcgagcaagtttataggcaccatttttccagcagcctatgttcacttcatgtctctttgtcacattttggtgattcttgcaatatttgaaacattttcattactctcatgtcaagtatgttgatctttgatgttacttttgtaattgttttggggtgtcatgaatcacacctgtaagatggcaaacttaatcgacaaatgtgtcttctgacagcctcaccgacccgcagttccctcctccctcttctcgagcctccctattccctgagacaagacagtattgaaattaggccaattaataaccctacaggctgagcgcggtggctcacacctgtaatcctagcactttgggaggctgaggcgggtggattcctgagttcaggagttcaagatcagcctggccaatatggtgaaaccccatctccactaaataaaaatagaaaaatagccgggcgtagtggcacatgcctgtaatcccagctattcgggaggctgaggcaggagaattgcttgagcctgggagatggaggttgcagtgagctgagatcatgccactgcactccagcctggccaacagagcgagactctgtctcaaaaataaacaaataaataaataaataaataaccctacagtgrcctctaagtgttcaagagaaaggaagagtttcatgtcttttactttcaacagaaagctagaaatgattaagcttagtaaagaaggcctgtgtaaagccaagacagtccaaaagctaggcattttgcagcagttaaccaagttgtgaatacaaaggtccagttttcaaaggaaatttataatttaaaagataagttcttgaagtgttactgcaatgaacacacaagtgataaagcaaagcagccttattgctgatatggagtaagtttaagtggtgtggatagaagatcaaactagccacaacattttcttaagtcaaaacctaaccagagcaagaccctaattctctttaattctgtgaaggctgagagaggtgaggaagctacattgtcctcatcagactaacacaggaacagaaaaccgaacaccgcatgttgtcacttgtaagtgggagccgagcaatgagaatacatggacacagggaggagaacagcacacacgggggcctgtcaggcagtgggatgtggggagagcatcaggataaatagctaatgcatgctgggcttaatacctaggtgatgggtctataggtgcagcaaaccaccatgacacaatgtttacctgtgtaacaagcatgcacatcctggacatgtaccctggaacttaaaaaaaaaaaaatatatatatatatatatatataaactgaagctagcagaagttggttcacgaggtttaaagaaagaagcaatctctgtaacataaaagtgcaaggtgaaacagtaagtgctgatggagaagctgcagtaagttatccagaagatctagctaagattgttgatgaaggtagctacactatacaacagattttcagtgtggatgaagcagcctgatattggaaaaagatgctgtctaagcctttcatagctagagaggagaagtcagtgcctgggttcaaaggccagactgactgtcttgttagaggctaatgtagctaatgactttaagttgaaaccaatgctcgtttaccattccaaaaaccatggatctcttaagaatgatgctaaatctactctgcctgtgctctgtatatggaacaacaaagcccagatgccagtacgtctgtttatagtatggagtactgaatattttaaggccaccattgagacttcctgctcagaaagattcctttcaaaatattactgcttattgacaatgcatctagtcacttaagagttttgagagacatawacgagatgaatgttgttttcctgtctgctacaacaactattctgcagcccatggatcagtaatttctacttttattatttaagagatacattttgtaaggctaaagtttccctataaagttatttctccatgaatctgggcaaaatcaattaaaaaccttctggaaaggattcacctgaattcttgataccattaggagcattcatgggaggaagttaaaatgaagtcagtatttaccaggagtttgaaagaagttgattctaaccctcatggatgactttggggagttcaaaacttgagttgaggatacaactgcacatgtggtgtaaataggaagaaactagaattagaagtggccaggcatggtggctcactcctataatcccagcactttgggagtctgagacaggaggagagcttcaggctgggagtttgagaccagcctgggcaacacagtgagaccctgtctctacaaaaaataaaattagttgggcatggtggtgtatacctgtagtcctagctactctggagactgaggcagtaggatcgcttaagcctaggagtttgaggttacagtgagctatgattgtgccactgcactccaatctgagtgacagagtgagaccctgtatctaaaaaacgaaaaagaatagaaaaatggagcttgaaattgtgactgaattgccacaatctcatgatacaacttgaacagatgaggaggtaacttatggatgtgcaaagaaagtaatttcttgagatagactctactcctagtgaagaagctgtgaatgttgttgaaatgacartaaaggatttaaaatattacgtaggcttacttgataaagcagcagcaggatttgagaggtttgactccagtttcgaaagaagtcctactgtggataaaatgctattaaacagcaccgcaagctacagagaactctttcatgaaaggaagtcagtcagcgtggcaggtttcattgttgtctcattttaagcaattacccagccttcaggaaccagtgccgtgatcagtcagtagtcatcaacttggaaacaagaccccccacctgcaagaagatcattaactgaaggcttagatgattgtcagcttttttttttaagcaataaattattttaaaattaaggtatgtgcattcctttttagacataatgctgttgcatacttcacagactgatataaacatgatgtttgtatgcactgggggaaaatttttgtgtgacttgctttattgcgatatttgctttctcatgctctggaacccaaactgtaatatcttcaaggtatccctgtgttttaatctatgtaatactcttttgttggatagaagataattttatctaagtcagttgatcacattttttagtgatttgtactatgttgtaagaaatcttcgcctgtgccaagtttacaagattttttttttctgttttcttgtaaagcttgataagttttagctgttacatttagatatattgtctgtctttttttttttttttctttgagacggagtctcaccctgttgcccaggctggagtgcagtggcacgatctcggctcactgcaagctccacctcctggttcacgccattctcctgcctcagcctcccgagtagctgggactacaggtgcctgccaccacacccsgctattttttttgtattttttttagtagagacggggtttcaccatgttagccaggatggtctctatctcctgacctcgtgatcagcccgccttggcctcccaaagtgctgggattacaggcttgagccaccatgcccggcctatattgtctgtttttttgagacggagttccgttcttgttgcccaggctggagtgcaatggcgtgatctcagctcaccgcaacctccgtctcccaggttcaagagattctcctgcctcagcctcctgagtagctgggattaaaggcatgcaccaccacacccagctaattgtttgtattttttttagtatgttgttggtcagactggtctccatgttggtcaggctggtcttgaactcctgacctcaggtgatccgcccacctcggcctcccaaagtgctgggattacaggtgtgagccaccgcacccggtctattatctgttttgagtaaattcttgtgtttgctgttaagcaatggttgaggttatttttttcacatgagtatttagtgagcaacatttgttgaaaagactattcttttccattcttcctcagtgcctttgttgaaaatcagttgaccataaacataagggtttatttctggattctgttttcttccattgatttttatatgtacctttgtaccagtacccattccctgctgttttgattcttcaggccttgaaatcaggtcgtctaagtcttccagttgtttttcttttttaaagttgcgttggctattctgggaactttgtacatctattgcacatttttagattctgcttgtcattttctccataagagtctgctgggattttgattggaattgcattgaatctgtatgtcagtctgggacatctcaatattgagtcttctaacttacaaacatggtaaacctttcctttatttaaatgttcaatgttgggacttacacatattttgttccacatattgttaagtatttcacgtttttctttcttttttttttttttttgagacagtcttgctctgacgcccaggctggagtgcagtggcgtgatctcagctcactgcagactccgcctcctggcttcaagtgattctccttcctcagcctcctgagtaactgggattataggcacttgccaccatgtctgactaatttttgtatttttagtagagacggggtgtcaccatgttggtcaggctggtctcaaactcctgacttagagtgatccacctgccttggcctccccaagtgctgggattataggtgtaagccactgcacccggcttatttcatggtttttaatgttgtcgtaagtggtacttttctttctttttttttttttttttaaagacgaggtcttgctttgtcggctggagtgcagtggcacaatcatagctcgctgcagccttgaattctggggctcaaggggttctcccacctcaccctcctgagtagttgggactataggcatgcaccattgtgcttggctaattttttgtttttgtttttgagacagagtcttgctctgttgcttgcctaggctggagtgcagtgacgtgatcatggctcactgtagtttctgcctcccaggttcaagcagttctcgtgcctcagcctcccgagtagctgggactacaggaatgtgccaccacgccggactaatttttgtgtttttagtagagatggggttttgccatgttggccaggctgttctcgaactggtctcaagcaatccttctgccttgagctcccaaagtgctgggattacaagcgtgagccactgcacccagctgtggtgtttttgaaatgtcattttccaattgcttgctagtatataaaaataaagttaatttttataaytgactttgtatcctgtgactttatttcatatattaatttcttaggatattgttaggtatacatgtcatctgcaaataaggacagttttatttcttcctttttaatctttgtgcattttgtttctctttttttctttattgcaatgcttaagactttaaacaatgctgagtagaagtggttgatagtggacatcattgcctttttcctgaccttaggggaaaagcctccagtcatggctggtggtagtttatagatgttcatcatcaggttcaggaactctttctagtttgctgagaggttttgtcacgaatggaagttgaattttgtcattttgttaaatgccttttctatatcatttcttcctctcattttatccattaaactacacagacttttgagtattaaacagaacttatattcttgggataaaccccacttggacattatatattgctagattctatttgcttatcttttgttaaggttttttgtgtctcttttcataagagataatggtttgtagttttcttgtattcttttttatctggttttgctatcagtgtaatgttagtcttatacagtgagttaggaagcatcccctcttttctgagtttgtattaatattttttcttccttttttatttctgctcccactccactgggatattttttctttaaatgttgcctaaaattctctagtgaagcctagttcactagacttcatgtgggtttggagttttctttgtaggaagactttaagaatttagtgtctttaataaatgtaggactatttagatattatgttttctttcctatcagtttgataatcagtatttcttaaggaattggttcatttaagttgctgaattgattgtcatattctactgttattaccctttaactctagaatgtgtagtgctgctttttcgttttcctctctagtattggcaaattatgatttgtctgtttcctctatcatcaagccagagttttgtcagtttcattgattgtgtccccccaaaaaaaaaacatttggcctgttcatttattacttcgtttattttttctctttgctttctttctttctacttcrgttttaaattttttaaaattttgaaaatttttatataatcatattttgttgaatgaagtgctgaaacccaggcaaatggtggtgacttttttggtttgttttagagatggggtcttgctatgttgctgaggctgaccttgagcacctaggctcaagcagtactcccaccttagccttccgactaccttggactacaggtgtgtgccaccacacatggcttggttttaatttttactttttctagcttaaggtagaagcttacctagttcattaattttaagcctttttttaaatctcttttgctcatttttgtagtatgtatttgctttttcttatagatttgcttttttgagtgcttagtatatatggtatagttttgcccctagtttattgttttcaaatgttttatagacatttttaagatttgtgtagctagttacatcaattgttaatatttatgtcagttttagaaaatcttccaacaatgcatgagttttttgattcacttgcattcttttatgaatattaatttttttacatttaaatctttaattaattgttgttgtggtatggtatgaagtagagagctgatagtatgttttttctaaagtatacagtttttctcaatatttttcattgtataatcccttttcctaataattttttaagggcattgttttagtctctattctttttcagaaatttcttagctattatcctgggtataaatttgctgcatgaatgaatcattttgcaaggttttgtaaaggaatttcattaaatttatataactataattgcatctttatagtaatttttcaagtccagarcttgtcatgtcttccagtttatttaggtgctttttttwaaaatatccttaagtaaagctttattctctcattaaagtattacatttttcttgttatgcttattcttagatatatgttggcatttcttctattgtgttttccaactggttattgctagtgtattctttaaatagttggctcttgagacagttgtctttggaaaaagattcttggcctggtggggtggcttatacttgcagtcccagcactttgggaggctgagatggggggatcacttgaggccagaagtgtgaggctacagtgacctataattgtgccactgcactcctgcctgggtgacagagtgagtccctgtctctaaaaaaaaaaaaaaaaaaaaaattctgtagtgatggcttagtactgctttactgctttgcaatgatcttataaaawgtctatgtagaaataaaaggtgatagaataaaggtcattaaatttaattgtaggtattcttaactgaactaatttcctawtttwaatcatcatctggatatttttagtcttctggctatcatttttcccycccygtttttttttttttttaaatctccacttctggtcctaccttttactttgtctcatgtgttcatgccttccaattaagatactgagtaagagagtaagatgttattcatattttaagattatgagctttacaatgacagtgtcttccttgtctttctattgattgtatggagtgtttgcatatgtattaaataaaagtatttacttaggttaatgtgtagaattatataattggatattttgaacaaatttactctgtatttggtttgatattttttagtaatagagaatttaatgctctaaaaatatttgtatttaaatgtaaacaatcactacagttacacaatagacattcacagaaataattttattagtgyttgtttgtttgtttgtttgttatattttttgagacggggtctccctctgtcgcgcaggctggaatgcaagtggtgtgatcacagctcaccacagcctcaacctcccaggctccagtgatcctcccattttagcccccaagtagctgggactacaggcatgcacccctatgcccagctaatattggtattttttgtagagatgggatttcgccatgttgcccaggctagtcttgaactggactccaaccatccactagccttggcctcccaaagtgctaggattacagcatragccaccatgcctggtctgaattttattagttgtaagtttgttatggagagagataatgccactaaatgttaatgatcatttgaggaattccctctgcttcaatattgtaaacattattaggtgtttttatggcaatacttattttttccttaagctttattcaggtacaatttatatagagtaaaattcacctgtgtttgatgtacagtttgatgactttgggcgattctatattgtcatgtaaccactaccacaatcacgatttagaagtttcatcacgaaaaagtttctttgtacacctttgccttggcctcaaacagccaccccagtgctttttacttgttttaaacaatgcagtgatttttagtagtgtatttacagagttgtgcagccttcaccacagtctaattttagagcatttccattaccccagaaagaaacttgtaccatttaaggtcactccctctccccatctccagtcctaggcagcaactaatctactttctgcagatttactttttttggcaaatagaattatgttatatgtgttcttttgttcctggcttcttttggtttgacataaacattaccaacttttaaggattttcatgaaattactttttttaaaaacagggaatgactctactaatgatggggtcagcagatgctcttccagaagaaccctcagccaaaactgtcttcgtagaagacatgacagaagaacagttagcatctgctgtaagacacaccagattttatgtgtttgatcactactttttgaaggaccattattaaggtgtctttcagaaagtagcatctgaatgtcttgaagacttaatcattaataccaagatagatatttttagcagtaaataagagttttattatttttgattagcttaagggagtccttctgtagttaaataaggcacagctaggggtttttttttgtattgtacaccttactactggttttcagacttccaagtgaatttacttaggcttaacttacatatatttagctaatatctgtaataaatatgttcctggcagatagtactatataagtatttactattactattttatgagaaaacagggtcmaagagtagtttaaatgttgggatatttaaatttttaaaatccttcatgtggaaaatacatacattttatcctgaatttaaatgcaaaatcagtttagaaactggtcaacacgtgtcaattttttttttaacacctagcatttatttagtgccattcattcattttcatggtttttttttttgctttttttttttttttccttgagatggggtcttgctctgtcaccccggctggagtgcagtggtatgatcatagctcactgtaacctcaacttcctgggttcaagtgatcctcccacctcaggctcctgagtagcgaaaattgtaggcgtgcaccatcatgcccagcaaataaaaaaaaaaatttttttttttttttgtagagatggggtcttgccgtgttgcctaggctgatcttgaacttctgacctcaagcagtccttccacctcagccttccaaagtgctgggattacaggtgtgagccactgtgcccaacctgttattttgctttttgttttgaagtgtttctttgcatattttgcctattctcttctcttgataaacctgcaaaaaaggcaagactagtatgattattctcttattatatttaagaaggaaactaaaacataatatgatggccagcatgatccaagtaaactttttttkgggggaaataaaactgtttctttagcgtgaaggcagaatataaattggtagaagctagtaaatggtacttgattcaaaatgagaattttagtgatttatatatgccatgtcattttgtaaaaatggtttaatgatttaatcctttttttttttttttyccaactagatggagttaccatgtggattgacaaaccttggtaacacttgttacatgaatgccacagttcagtgtattcgttctgtgcctgaactcaaagatgcccttaaaaggtaagactgcagtcttttttgggtaagggatgttcacatttggatgagtagtattgttttgttttgctttctttagcatcttaattgagatataattaatttattatacaattcagcattttaaagtgtttaatgctttttatagtrtttacaagtttgtgcaaccatcaccaccatcgattttaggacattttccgccccctccaaaagcagtgtcgtactcactggcagtcactcctttaaccccttcacccacctctagccctagccaaccgttcatctactttctgtcatagatttgctcattctgggcatttcatgtaaattgaatcgtataatatgtggcctttttgcggctaacttctttcatttggcatgttcccatggttcattcaggttacagcacacgtaacacctcattcctattttatggctgaatagtatttcatggttcactcacgttacagcacacgtaacacctcattcctattttatggctgaatagtatttcwtggttcattcacgttacagcacacgtaacacctcattcctattttatggctgaatagtatttcwtggttcaytcaygttacagcacacgtaacacctcattcctattttatggctgaatagtatttcwtggttcattcaygttacagcacacgtaacacctcattcctattttatggctgaatagtatttcatggttcattcaygttacagcacacgtaacacctcattcctattttatggctgaatagtatttcattttatggatatatcacattttatttatccattcattttgttgatggaaatttgaattgtttctcctttttggctgttatgagtaatgctgcagtgaacattcatgttttttgtgtagatgaacgttttcatatagtaactctatgtttaatgttttgaggaactgccacaatgattttccaaagtgacggtaccattttacattctcaccagcaatgtgagaaaattgccaatattgtctgtctttgattaagccatctagcgctatgaagtgtggtatctcattgtggttgtcatgcacattttttttagtggctaatgatgttgggcatcttttcatgtgcttattggccatttgtatatcttctttggagaaatgtctgtttaaatcttttgcctgtgttttaattgggttatttgtctgtttaaaaattcaattgtgtttttacatatatacaagttccttacccaatggataatttgcaaatcttttcttctatactataagctgtcattttactttcttttttaaaatttatttttttcctaagtctgttgtatgcagtctccttttacttttcttgatggtacgtttgtaatgcaaatgttttttaattttgatgtagtttaatcttaattttaattttttcttttatcacatatgcttttggtttcatatgtaaaagccattgtctaattctaggttacaaagacttacttctttgttgtttttcaagagttaatatacttttagctcttctattcaggcctgtggttaatttttatgtatggtgggagggagggaggtatttgcctattattttgcatgtgtatatccagttcttccagtatcatttgttgaaggctattgtttccccactgaattgtcttagcaccttttttgaaagtcagttgaccttaatgtataggttcatttctggaccctggattcttttccatttatatatatgtctatccttatgtcagtcagtactggtttcaaaaaagaaagaacattttgtttttataccrtcgtatgaaaggaaaagagtaaagaattaattacaaatgttttgagaacctgtaaaatggtctacaaataagggccctttcttccggtgagtataagtgtaacttaaaaaatatgtaacttaattctgactaaatttatacaactgtcttgatacataaattgtcagttctttatgatagaattctgaactacaatttggattctagacagctttatgaatattgatttttgttttttcccctcagtctattgtgaaatgttgtgatagaactgagcagaagagaagggagagaaggagtgtgcaaaaatctgaaagagtgactttaaaggttttctacatttctctgaagcgaatagttgtcaggtatttatgagaaattgcatagattgcagctgatatattatcagtgaacaagacacagtatctgtcttcaaggcacctacagtctaatagagaaagactatcaagtaaacaggtactgtttcagaactgctttgatgggaaatgtaggctgctatgagaacatctaagggagttcatcaggggtatctgaggatagtttgggaagacttcttagagtaactggtatttaaacagttaggtgttatcccagcctggatgagaggttagggaagtgtgagagtggactggaggaaagagtttttaagcaacagtctggaggcaggagactgcaacatactcagtgcaactgcctggagaaggatggatgtagaaacggtgatagatgggagattagcaggggccagccagaaatcttgaagtcgtttttaagaagtgtggacttcgtgttgtgggcgaagagaaaccattggaagattttaagcagagtactgacattcaaattatcctctgaattctaggtagctaagattattattttattcttcaacagtttttattttaattttgcttaaaaaattgcctggtgaatcttactgtgtcttttatatatatcccaaaatattgctttattttaccctttcctcttatccttggatgataatattgcttggagcaagagtctaggtcaaagccatttttcctcagtgattggtagttatttgtccactatttttgtgtgtccatgcttactgatgagaggtctgatatcagtcttgatttttattcttttctgttagtagcttttagggttttctcttttttttttttctttcccccagttttccaagaatgtgagactgtgggttttatttatcttataaaagtactcagtgagcacttttagtctgaggactcttgtcgcaaactctaggacatttcttggtcattatttctttaggtactgcttctcctccacctggtttcttatacatattaaaatttctagatctgttttttagtcttctaactttcctccgtgttttaaatttttataatttttatgtgatgtgctctaggaaaatgcctcagttctgtcttacattttactgattcatacgtctactttgtttcactgcttacttatcatgaccttctgttcttttttataactccttattcttaatttttggatctaaatcctgcttttatttttctgaggctctgaagtatttttatttaaaggttttttttttttttccttgttgtttggccttttaactctgttctttttggatgtaagggttgttcttccctcatttgtttaaaggttgtgtgctcatatcatgcaaccatattctcttccttatgtcccagttgcaaattatctgaataggtagtttgctggggtagctttctggctagcacccttgggagtggctgatggagatagccttggctcacttccaagatttcctctttactgttttcttcttggatgccttttagcctctgttcctgagagagtgctcttttatgttttggaaagagttctgtgtaagcaggggagatttcatcctatgtggttctattttcctgaaaccaaaagaagtattttttgtttttcctttttttaaaaaaataaaagtgaaagttacttttttcgctttttggtttttatttttagtattttttcttttttttgtacagcaacctctgatgccaaacaaaagaagtagtttttgaattctaaattttctcaagagagtgcacttactaacgtaattgatacaagatgtcatggatggtggtatgtctttggaaaaatggcactaactgataaaacaagaatgaaagaacagaaaaacattccacgagaggtgttttacagctggagatgaggaagaccatcctcacaaatacttagcagaacttgtctttggcaggttctatagagtgggaggtatgggtcccragtgtgatggctcacgcctgtaatcccagtactttgggaggccgaggcaggtatctcacttgagcttaggaatttgagactagcctcggcaacgtggcaaaaccccacctctacaaaacagacaaacaaacaaaaaaccaaaaattagccaggcatggtggtgtgtgcctgtagtcccagctactcagaggctgaggtgggagattgcttgagcctgggaggtcgagyctrcagtgagccatcagtgtgccactgcactccaggctgggtaatagagtgaggccctgtctcaaaaaataaaataaaataaaaagagagtgggatgtataatgatggagggtagaaggaaagtgtgttcaagagaaatagactggattagcttaagaggcagtaaggatcaagaactatagccacaggtgaaaataaggtttgaaatggcttgcttaatgccgcccaacagtggaatcccatcatactcctggagttagattctcaatttagaacctagagtgaaaactatatgttataaaaaaatcatcctaaaattctataaattactcctcaaaagacagtatcacatggccgtatctgttgtattggagactggcaagccccagctctcaatatacacagygttaacagttactaggttgctgattttctttcattttttttttcttattttttatttatttattttcgagacagagtctcactccctcacccaggctgcagtgcagtggtgcgatctcagctcactgcagcctctgcctcccggcttgagcaattcttctgtctcagcctcccaagtagctggaattacaggtgtgtgccaccatgcctgactaattttkgtatttttagtagagacgggtttkgctatattgtcaaggctggtttcaaaatcctcacaagtcatctgcccgcctcagcctcccaaagtgctgggattacaggtgtgagccactgtgcctggctgaaaatatttgtctgttaacactagcgtctcattcagttcagtgagatgctcatattatgagaggcatgcaagaactgagacactcggagagaacagaaaagccccatatctcatctcacagctgtctaggggatatgttcattgagtggaattgcatgtgggattgcttacactacttaaattattttcttttttttagctttttgagggcatgtcttcatttaaaatttaaaaaaattttaaattattttttattttttgagacaggccctcgctctgttgcccaggctctggagtggcacgatcacagatcactgcagccttgacctcttgggctcaaggatcctcctgacttggcttcccgagcagctgggacctcaggcatgcaccactatgcccagctgattttttttttttttttttttaagtagagacaagagatggctatgttgctcaggctggtttcaaactcctggcctcaatcaatcctcccagctcagtctgccaaaatactgggattacaggtgtgagccaccacatctggcacacatatcttcattctaagtaacagatttcaacttgttcttgacaaaaaaattttaaataacagaaaagtctacatatttgatattcactttttctcagccatcttctcggcccttatgtcaggatatgatgaaaatgcatcatacatttaattcatacagattgaagatgtgccctgggctggatgtgatggctcatgcctgtgatcmcagtgctttgggaggctgaatctatagcttgaggccagaagtttaagaccagcctgggcaacatagtgagacccgcatctctgcaataaaaaagaaatagctgagtgtggtggtgtgcacctgtagttccagctactcatgaggctgagctgggaggaatgcttgagctcaggagtttgcaactgcagtgagctgtgatgatgccactgcactccagcctgggcaatgcaatgagaccctgcctcttaaaaaaagagatgggccaggagcagtggctcatgcttgtaatcccagcactttgggaggctgaggcgggcagatcaccgaaggtcaggagttcaagaccagcttggctaacatggtgaaaccccgtctctattaaaaatacaaaaattagccaggtttggtggcaggcgcctataatcccagctactcgggaggctgaggcaggtgggtcgcttgaacccgggagcagaggctgcagtgagccgagattgcaccactgcactccagcctgggtgacagagggakactgtgtctcaaaaaaaaaagagaaagggatgaagatttgcgttatatttgggttttttctttaaacatatgtgtagcagtgtatgtgtttttttataaccaattcaaacagtcttaaatttgtgctcatgtctttgtttttatgcttacatattaacaattctgcagtacatcttgatgcataggattctttggatcaatttctggaagtggagttagtgggttaataaattagagtggatagtttgacctttcaratattggcagttgttatcccaaaaggtagaaaaatatgaatgctacattctgtacatattcatcaatgtaaaatattataatgataaatattttttgactactggtaagattgaactactgtttactcgtgagtttattggtgacttacatttctaaggtaaaaatctaggtttctcttttttctcccatcaccatttattgtatattgatacacattgatcttttatcatatgtattattattaaatatttttgagacctgttcctagattttctaactgggtttatttattgaggtctgattttcgatatgtgtttgtattatgccattttaaccatctggtgtgtagtaatgcatacttcttactttcagtgtattactggatagtttgatccatattttacatatctttgaacttcatagtcatgttcaatacgcctttctccctctaaatggatatatagtgggagtgtcagcctttgggattttgaccataatggctttaagtttgggataaattgacatttttgcaatatttagcttccccatccaggaatataggctgtctccccattgtttcaggtcttatttgactttcagtaagatggatttttttcacgtgttttatttccaactgttttgaatttttgtattttgtaatgttagatgaattttcccttgatcattttgttattggccctgctagctgatgggaagaaatcaggagtactaatttcaaatatcagatttccatggttccaagatatactttcccctaatattgaaatagtccttatattctatgaaaattttaatgtagtttttatttaccttgaaaacacatttatttaccctgaaaacacattttagttatgatgatatttatgattatgatttatgatatatttatgaggaaataaggcatattttctattagtatttggattttctaaatagataatcaaatccattactcaggttatttttgtctgtttcaggtagtttacttcatgtttctttcgtgcttcactggctagaacttttaacacaatgttaaatagtagatggttgtggaattctctcttgtttttgattttaataggactgttgtattttagggttaaatattgatcttgggtttggtggaaatgttctttttttcttttttctttttttctccttgtcttcttcccctcaggtttggtggaaatattcttaagaatgttaagaaagtatccctccatttgtttactggaggttttttaaaaataagaaatacatgttaaaattatcaaatgttgtttgttgacctagtactaagatttttctcactggatctatttgtgatacattatgttaatagttagcctaatagtagactatattcctgatacattcgtattctttcaatatatagcgctgaatttaatttgctggaacattttaaaaggatttttkggggtcatttgttagtaagactgatttatagcattctgtctccctctggcytttttttttttttttttyctttgtgagggtttggtgttacagttatgctagctctatgtctrtcttttcctggaacttttattttctttcatgtttttataggactgatctgttgttgaaagccttgcccatgaaattgtctgcactcagcttttttggggtattttattttattttattttattttgagacagagtctcgctgtgttgcccaggctggagtgcagtggcatgatctcggctcactgcaacctccgcctcctgggttcgagcgattctcctgcctcagcctcccaagtagctgggattacaggcacccgccactatgcccagctaattttttgtatttttagtagagacgtggtttcaccatgttggccaggatggtcttgaactcctgacctcaggtgatcccccggctttggcctcccaaagtgctgggattacaggcgtgagccaccgtgcttggcctttggggtattttaaatgtacttattctcttctaaagtcagttttggtaatttatattttcctacmaaattgtcctgtctttaaattatttcagcttaagagttattctactattggacctgtatggttttttttttgtattttwatttcttatttgttatatttgtgttttcctcccttgattttcttgctagagatttgtattttagttttcaaagaatkggctattagatttgttcattcaatttttkgagttgtctgattcatcctacttttgtttgtattaattttttcttatttctgtttaccttaggcttgttttattgtctattttctaacttaaaagtttcatatgtggattgtttacttacccttgtgtagtaatgaaagcatttagttctgagattttgcttgttctctatttgttagatgaggctgttcaaatgttgacaaaagccactagaaagtctcttatcttttccttttagctcagttttgtttgttttttctttgtttttwtttkgagaaggagtctcactctgcctccagactggagtgcagtggcacaatctcggctcactgcagcctccgcctcctgggttcaagtgattctcctaccwcagcctcctgagtagctgggactacaggcgcgtgtcacaacgcccagctagtttttgtatttttattagagacagggtttcatcatgttggccaggatggtctcgatctcttgacctcgtgatccacctgcctcggcctcccaagtgctgggattacaggcaagagccaccatgcctggcgcgtttatttttgattatggaagtataacatgccagagtatacaaattataagtgtacaactcaatgaattgtcccagggtgaacacatccatatacccaaaataaaggcagaacccttctagcactctaaaaatcccctcacagatcttaatcactaacaccgtttatgtttcccaaattggaaatactatcctgacttctaatctcatagatcaattttaccagttttgaactctatgaacagaaatgtacaaattgggcccatttgtctggctgatgactgggtaatgggtctggctcatgatgtttagtgtatccatgttctgtgtattggtggttcgtttatattcatgctatatagtatagtattccgttgtgtcctgtactaccaagttattatccattcttctgttgatgaatatttggtttatgttcagtttttggtgattatgaaaaaatatactctgaatattctagtacatttttgggcacatgcatttgtttctgttgggtatatatgagtatgtatgcatatgcacaaaatatatatgagtgaaactgctgggtcataaaaggatttatatattcagttttagtatgttttgccaaccagtttcaaaaacggaggtaccaattcatattttcattagcattatatgtgctttccatctgttccacatccacccccaagagtttaagccaagttatttagccagtggatttagaaacacatatatgaaagcatatgttataaatgtactttatttcactatgggtaaggattgtggcctacataacttttggtttttggaaatttgagtttgtctttttgatctgatgtatgattgaatatttcatagggactagaaaagtcaaaatgtcctctctttgtaggtgtcaaagtataatagacattaggttaattttattatgttctgattttctatatcattactttttatttattgacttgacagagataaggaaagattctcagtacttttgactgtaaaacctctcagtatttctgtcagtttccttttattttctaagtttttctttataaacttcagtgttaatgttatttggcttaatggatggttttacatgaattaggaattacattttattgctctaatatgggaatttttttttggatattaaattacatatgaccttccttagttacaaaaaaaaggttgataattcattagtatatctttgccataaatgtagaaatagttacatattcatgttaccctataacaagaagtaaaattcagtaacagcagcgattatatagctaattacatacccaagtgatgttcagggtatgtctgctatattagtacttaattttaatttcaaaaatgccttttaagaagttgctaaaatgtcttaacagggaaatgtaatgattttcaggtttttaaaaatgaacacacataattcaggcattattgtgaattattgtgtattgaaaaattaagaaaattcgttgagtcacatcagtttccgaaagatgcaaacaaatgaaaaagggaaaaacaaaatccttcaattgagtacaatttaacacaatactctctgtgatttctttcatactacttaacataagcatagaggttttgctttttaaattgagatataattcacatctagtgaaatgcatatatcttaagtgtttggtttgatcagttttgacaaatgcaaattctctgtaatccatttgcctatcaaagtatagaacatttctatcatctcagaaaatttcttgggcatgccttttctcagttaatccttatcctctccacccccttccagcaactactgatttcatattagtttgcacattctgaaacgtaaaataaacggaatcctacaggtcatgcttttcttttgttctggcttgtttcactcagtatctagcttggagatccattcatattattactgactagatcagtaattstgattgctccacaatcttgccgatattgggtgatactagttttttttaaattttgattttagtcactctaatgggtgtgtagtatgtacacatagtttaatcatagtgtatatgcagtctccctctcacttcagtgtttgatattaactgaatgataatttctgagcttttgtaataagacattgtgtgagtaatgactatggtttgaatagtcatttgaaaaggaatttgcatggccagtttgttgtactgttgtaaattaagtgaggatcataaagctgaaagtgaatttagaaatcatttaatagaagcttctcagtttacagatgagcaaactgacctacaaccttaagtgacctatttaatgatacacagcaagctaatgctgaatgtaggtgtatgatttttgattgaatgtttttgatctaatgcttatttcttccaagttatttcagagattgtgttattttattttctttgtaattaatgaatagtgttgtttcacaatactttcagaaaatgtttgttttagctgggtacagtggctcatgcctgtaatcccagcactttgggaggccgatgtgggtggatcacctgaggtcaggagtttgagaccagcctgcccaacatggtgaaaccctgtctctactagaaatacaaaaattagctgggcatgatggtggacgcctgtaatcccagctgcttgggaggctgaggcaggagaaattgcttgaacccaggaggtagaggttgcagtgagtcaagatcatgccattgcactccaacctgggcgacaagagcaaaactctgtctcagaaaataaaaaataaaataaaatgttcgttttatatgagtttgacaaagggaaagagcttaaagtaggctccatctaaattcccttttcagcattcctttttttctccatatttctggtcatgcaagaccagaagagaagaaaaggaaaggtgggaacaactctgagaaacttgcagttgagggtgtcataagaactccttttaactggtttcttcccatttgagtgttagaatgaattgaattctattgtttaactcggctttaatgttcctaggtatgcaggtgccttgagagcttcaggggaaatggcttcagcgcagtatattactgcaggtttgtatactaaatatactactttttgataggagtaagacattctatttttcgctcacaatcctttgcagtttacagaatgtcttttgtaaaacatcacctcattaagcctggagtgtacattatacttaagttaaacaacttggtacttattttatcgtccagattataaatcaatgatgtctgtcgtttgtgaaaaataatcttyggatttttttggattaaattataattttggcttcaggtttgatttgtataatayatatctttggggttgactctggggatagccagcgacgggttttatcataatccatgtatcattataaaagagggtcttagtgaatattggtgtaaagaagtgatgtgtgtgaggagaaatagtaatcttaaaggatagaaataactggtttcttcattgcataagagaatataacccccacctaattttggacattttaataytgttaaatctttgggttaggtcaatagggttttacagccatgcctttttttttactctctctctaacagctttattgatatagtgtacatatcataaaatctgcccatttaaagtgtataattcattgttttttagtttatccacagagttgtgcaaatattactaaaatgttaattttagaacattatcattccaaaaagcaacttcataacatctagcagtcacctcctttcccatttctagccctacccatttatctatgtgttatttctctctagatttgcctactctggacttttactctaaatggaattaaataatatgtagtctcttgtgactggtgtctttcacttagtataatgttttcaggattcatccacattatggcatgtatcagtacttcattcttttttattgctaaataagagtgccttgtatggacaagccacatatcatttatccattcatcgttggtggatatttgggttgtttctgcttttcgactattacaaatactcctgacagtcgtgtacaagtcttggtgtggacaaatgctttcatttctctttggtatgcatctaggagtggagttaattactgggtcatatgattactatatttaaccttttgaggaactgccagaattttccaaaggagtcccaccgttttacatttcccccagaagggtwtgagggttctgatttctctgtctccttaccagtacttagtattgtatgtctttttgactatagccatccaagaggtatgaagtgttatctcattgttgtcaaccattgatttttgatattataaacaggtttcttttgtgtcatttgcagttagagagattttactctaactttttttcctaaagtagacttacttgttgaaatgaagtttttagtgagaaagtgtgatcatttatatctacttcatttgacagctcatgtatcttagaataacttagaatttcagcagcttctgcagcatcatatatgcggctaatagtattgatgcgatgaaaaatactgttctttacatttttgcttcttgattttttaactttttgttttgaaatacatttaaatttacagaaaagttgtaagaattcaccagttactaacttttagtcgcatttggtttctcatttttccgttatgcatgtaatttttttctgaaccattttagaataaggcgccagacatcctgaatatttcagtatgtatttcctaacaataaggacattcataaccacaagacaattcttaattttcagaatctgggctgggtgcggtggctcatgcttgtaatcccagcattttgggaggctgaggcgggcagatcacttaaggccaggggtttgagaccagcctggccaacatggcgaaaccccgtctctactaaaaatgcaaaaattagccgggtgtgttggtgcatgtctgtaatcccagctactcgggaggctgaggcacgagaatcgcttgaacctgggaggcagaggttacagtgagctgagattgtgtcagtgtactccagcctgggcaacagactgagacactgtctcaaaaaacaaacttttttttagaatttgggagtttcacacagtaccctaaaatacagtctttattcagattttgccaactgtcctagtattgtccattaaaaaagttttttttttttccttcttcaggattcagtttaagatcccacattgcatttagttgttatatcttattagtctctttwaatctatatttcttctkgacctttttctttcaaactaatgaaatacttttgagatgctctgttgatggtatatactagatcttaaatcatctgttttttkgagtagtgtataaaatattgttaaaatgtaggcttttatttaaaaaaataattagcttggtagtgatgcccaaatttcagccttccctccaaaaatattttttaaacattgtgttcagttttgttattcaggaacattttattgagcccctgctttgtgctaagatgctgtagtatttggtgggttcagtctgtayaatgatgataggtgacatttcacatcttgggtattaataaaacatacaagttgagataagctagaggaagagttttgctgtacatgaaggagggcaaggtatgatcactaggaagtccgcagaggagaaatggttcgaaatccaagagaacagactagtccatgactgtgagattcatgctgctgagaggggtaagtggaaagaaggttttctgaagaaggtaaattcttagtagtttkggttcttagctgtccagtagagtcagctgtttaaggacccagatttaaatctccaggagttgagtagatgagaaccaactataggtttaaagggaggtaagttgggagaggtgacccgctatcctgatcttggcagagtagcagaacaattacattatgcctgtttgtccctaaacagaggttatgtgttctttgtactgaattaaaacaccctgctttgtttgggaagacmaaggctggcaagaagaaagagagagggagggctcagaagttgtttacagctagtgattgctttgtaaggtcttctggtgagttaagatttaaaaaggatttttttttttcttattgagagtccaacaattgtcaaagagtagatacacttaaaaatgtttaagcagctgggtgtggtggctcacacctgtaatcccagcactttgggaggccgaggctggcrgatcacaaggtcaggagttcgagaccagcctggccaacatggtgaaaccctgtctctactaaaaaaaatgcaaaaattagccaggcatggtggcatgctcctgtaatcccagctactcgggaggcccttctgtgttcaagcagttctcctgcctcagcctcccgaatagctggggttacaggctgaagtgagcggatcatgaggtcaggagttggagaccagagcctggccagcatggtgaaaccccatctctactaaaaaaaaaaatacaaaaaattagccgggaatggtggcgtgtgcctgtaatcccagctactctggaggctgaggcaggagaattgcttgaacccagaaggcggaggttgcrgtgagccgagatcgcgccactgcactccagcctgggcaacggaccaagactccatctcaaaaaaaaaaaaaattaagtaagtttttgtttgtattaattaaawttaatttacagtcgcgtgtattaaatatgtgactgttttactaaggcaatgtttgctttgtctttaagcccttagagatttgtttgatyccatggataaaacttcttccagtattccacctattattctactgcagtttttgcacatggctttcccacagtttgccgagaaaggtgaacaaggacagtatcttcaacaggtaattagggcaaggtatttttcattctgtaaatgtaaaacttaggtttcctacatttaccntacttactggaacatagttcgaaatataaacatcagtcttctctagttcatgccacggctgtctcttgcctgragccgcacagtagtcttaactgatcatctggcttctgcctttgcccctttgcagtttctctacacagcccgcaatgtcctttttaaaatgamgataggattatgttggccccttgttcagtactccctagtgattttctaccgcagtcctaaatcctctagcccctggctttctctctgagttcatcactaccactctgtcccttgcttgcctctctccagctgcacaggcttccttaaacctttcaagtgccctcttcctgcagggcctttgctcttgttctttggctgtcagataagtgcaagaccagctccctcacctccttcaggtctcatggctccaaggccaaagccttaggctttccctgatgaccttattggaacagcacacktcccttcccctgatcacttactgtttccatcctgctttttttcgcttcataacccttatctctacttgaattttatatattcactgctattatgctgagtatctagtacagtgtttagcacaaattggagctcagcagatgtctgttgaatgaataagctattctagaatgctttattttttggaagatcgtatgtcttatttggcttaatatttttaaagaaggaaaccactttcttgcctaggagacagtgattattttggaagaactttgtagatcattcactgccaggattacttactttgtctttttttacattacaggatgctaatgaatgttggatacaaatgatgcgagtattgcaacagaaattggaagcmatagaggatgattctgttaaagaggtaattgaaatatatttgtgattatagactttcrttataccttgatttttttttttattttttttcccctcaaaggcttaaaataagttccatcttataggtagatgtgtatttaaatactttagatgctcaatctgtagtcagaatttggaagcttgcatacgacatttaaatttaatgtattatttattaaacttaattcattgttgattttkggtaatgttttttgaaggattttactgtaagggactacatttttaaaaaaatatgtattactaaactggattgtgtggaagaaaatctacattaatatttatataaagttggaatttttattttaatttttgcagacagactcctcatctgcatcggcagcgacaccttctaaaaagaaaagtttaatcgatcagttcttcggtgttgagtttgaaactacgtatccttatgagccaagatatagactatactcataccttattagaattggcataaatagcatcattggctgattgattggtggtgggtagaagaaaaattcttcagaggttttttttctttgagacggagtttcgctcttgtcgcccaggctggattgcaatggtgtgatcttgactcactgcaacctccacctcctgggttcaaacagttctgcctcagcctcccaagtagctgggattacaggtgcatgccaccatacccagctaattttttgtatttttagtagagatggggtttcaccctcttggtcaggctggtattgaactcctgactttagttgatctacccaccttggcctccaggtgtgagccaccgcgcccagcccagaggtttttatacctaaaaaaatacaataatggaaattaggaatttggaaaaatatacctattggagtgatcttgaaggataatgggattattcattatgttttgattaatataattattttaaatttatttcttgaaggatatttattattttttcctaagaacatctttagcagagtctacctcattttcattcaccttataaagaattaatttcttatatgtcaargtgactgttaataataacttttaaaataaaaaaagaattttttaattttataaaagggtgtgtatcaactatacatgagattgaaccagttaataaaacatgaatcaggaaagtactgtcttctaggtcatggttagaaaaacttagaaacaatttatgtacctttgggcttctaagaccattataagaccatactaaataccagcttatagtttagagtttattgcagtttatcttttaatacacatttattactcattgttgtttctagaattgttggtagccaaatgaacattcttaagtatgttgaaatgaatyttgggagactaaaaggttttaaatgccaatgaatgatactattaattttaatggaattaggataatgtattatattcaagagtatataacaaattgaatacccgttggcatattccttatcttagtttacaaagcatgaaatgtacagaatctgaagaagaagaagtcaccaaaggaaaggaaaatcaacttcagcttagctgttttatcaatcaggaagtcaagtatctttttacaggacttaaattggtaaggacaatctcagtccatccttgttgtttgtgaattccatgtttgcgagtaagccaaagtcattattcactgggctttaatggtcatttgtagacatgtgcagagcaatacgcattttgagttgcccgatacacacagtcccatctgaggtcaaacaagtacttggccttcttgtttcagcttggtaaacaaataccattttagcaggaatgttagaactgttgttttaaaaaaaaawttctgctttttgttggttatttcactgtttaagatgaccccccaagcacagggctgagtgctgtctagtgtttctaggtgtgggaaggctgtgatgtgccttactgagaaaatatacttgttagagaagcttcagttgggcctgcgttgcactgttggctctgagttcaatgttaattaatcaacacaatatgtgaaataaggtgtccttaaacagaaacacacataaaacaaggttatgtattgattggttgatgaaaatgttgtgatcaaaggctggcgggaatctaatcctgtatttcccctaggagcagtggttcagtattcattgattcagtgcttgtggtgactttgtagaacataattaccgtgactaacaaaatcaactgtatagtcagaaatcaaacaaacttcaactagctcttcatttcatagacaaaagcattattgacatggttgcatatgctaacaaatattgggacatctcactttttaatcactgggtgttcctgcttcacactgtgaagaagcacctagtgctttgtgctgtaccttgctttattttaaagcactcaagaaatgtttgttgaatagtttacatgtttgttaagatttttccttagagatagttgttttcatgggccctataacttagctgaactgttaactttaaggaaaattacttaatctaagctactgttttcttacgtgaaaatgagagtaactatagggttgtttgtgggtttgtgctcttaaccattaagggtgatcatataatgtattgtctaaaccaggacactttggtggagagtgaatgagggtatgttagtaattatgcaatataaactgggatttttctgtgcaaatcagggcatgtagtcgttctgccattgcactgtcttgcagttgaggccctggaatttaaagtaacctaattggcttttggcagagccagaactagaacttgcttctttcattattcagttagtgctgcttttccagtgccatactaaagaatacggactcacataaaatgtcagcttccactctgctaataagcccatggataaaacatacggttttgcttgctgacttactaatttggtgtgctttggggatatgtatatctctcgaaggatctccccatttgaactgataccttttaatagttttcaaattatagttcatgtgattccacttcaaaagcactgataattaggattgtttattttattttattttatttatttatttacttattttgagacggagtctctctctgtcacccaagctggagtgcagtggcacaatctcggctcactgcaacctctgactcccaggttcaagagattctcctgccttagcctcctgagtagctgggactacaggtgcgtgccaccacacctggctgatttttggtatttttgatagagacagggttttgtcatgttagcctggatggtctcaatctcctgaccttgtgatccgcccacctcggcctcccaaagtgctgggattataggaatgagccaccgtgcccagccaggattatttattttaaaagttagcttcttcctaaacacagttgtatgaaaaataaatgcatgaataaaagttagccattgcaacatctagatatttgaagaagggcctggagggcagaatttttaaaaatcctggttgatcctctttgctgtctcctctaaccatgaccaataaagagaagtcttgaaggaagaaaagtcagtgaaaaatgatgagacattggaataggtcctctgtgcagaggcctagtttgggcagaggaggtgggttgataaacactgaagtgggacatggattatgttgataaacaagatgatttgttatctgggggctctcatctatagtttgggataaggttggcaaggggaagggttgttaaagggcataagaagaagagtgagtgagtcacgctctgtcttatgataccgaggggagagttttgagccagtgtggatatgaacatggtgacttttaagagaaattcatttaaaaacacacaaaacttcttaacccccaggagccaaatcatgtaaggcatggtgtgcaagtttcaggatataccagcaaatgaagtctcagtgttaactggagagtgtggagtggagtgctttggcagggactctccaggatggtattttcttcacaattttgtaaaagtataggaaaaccgaacatacccagaaggtctagatgatagtggattggtggtaataataagatttcaccagatatactttcttgaaaaacctgtattcctagaatgtatttatttcctttataacttttaagatattttatcttttgttctgataattcttgagtaatttggcttcgtttctccactgctttgctgctgaataaacttggttaaatgttaaaaagctactccacagtgattccttttgtaatatgattagtaattttaaaaaatcagactttaaaattatacaagtgtaacatgcttaaacattaccagtaggttattttaattctaatttcttttttgtttgttttcttaaagcagagcacataagtagtgctaattctttctgtgacattagaaatagtagtgaatgtttgttaaatgtagagtatatgccaaatattttaccaggttttctacatgtactgactgtaattctaacaataacactataacattgattaccactaccaccttttccaaatgatgcccagagggataaataccgtttccactgttacacgggctgtaagaagcagaaaggtgatcatgctggttaagatatgtgcagcagctaaaggctttcccacatctgttaggttaacagaggtttctgtgttatgacttttttcaaatttaacaataattcattggtgctgattggcttttatgcataaaacgtaaagaacrggagtttcttgggctctcttaattttcctctagagtgaatattctgataataaacaggaatgacagctttgttatataaaatrcaatataaaattctctgaatctaagcatcatttggggcatagctaaaaaagagcaaacagtatttacactcggaggaatccacaacaacgtaaattatttgatgccttgtaagaattgaacagtatctaaaagtcttcccatattgtcatcaaattgtgtctcagtggtataaacccattgatgtactgtatattgcctcttaggtagtgctagtttttaaaaggcttactggtgtgattctatattgcagaaataaaatttttaaaactaatgtttggtcttctgttatgttctttcttagcgacttcaggaagaaatcaccaaacagtctccaacgttgcaaagaaatgccttgtatatcaaatctgtaagttatgcagtcctttcgaagccaaattccgcttcactgaaatatttccagttaattaattttatccagtcttaatttttaccaccaaataattaaaacttgtatggtattttgatgtaatgggatttctttmcattttgtctcctcagtccaagatcagccggctgcctgcttacttgaccattcagatggttcgatttttttataaagagaaggaatctgtgaatgccaaagttcttaaggttagtaatgaactttactttgtataagaaatgtaattctttgaaggtaattgctaactcacaattgctttcattattcctttaggaatagttaagctttctttgaaatatttaggggagctaatattagacaagtgattcttaactcagaacgtatattagaattatctattgtcttttttatttttaactgtacacacacctggcttctccctcacccccaaacatctgggtaggtcttcggtggggcctaggatattatatttttcaaaagattcatatacaattctgatggctctcctgcactacccagaaatagtgccctagaccacgtcctcagcttcagggatactgattcagtaggcttggagatgggtgtgaggtagggagtgataactctgcactatactctaggtggtttctttctttttttttttgagacggagtctcgctctgtcacccaggctggagtgcagtggcgctatcttggctcactgcaagctctgcctcctgggttcatgccattctccagcctcaacctcccgagtagctgggactacaggcgcccgccaccgtgcccggctaatttttttgtatttttagtagagatggggtttcaccgtggtctcaatctcctgacctcttgatccgcccgctttggcctcccaaagagttcctttctttcaggtgaaaggagaaagagttaaatcactggtgcccaaagagtacttaaattgtaatcccttgatttaggatccagcctcagaatctgactgtttttgttgagttgtagttctgctacatctccatagagtcctgggaggggcctatctatcattttagccttttgagcttaaattcttagtatattttccagtatacttagcgttgtatgagaaggttaaatgtagttgaagtatctagtgttgtatactttaaatatatactactataagctattgaactatatcactattacttctatgtaaagttgtatttcaaataaaaaaaaaaaaccrtaagtttattccagtttgggagrtccattattttcacagcagcttgtccaatatttctgagatgtttcttttctcaggtaaattttggtacttcctctgtggttagttttgtgggttagagtatttaatggaaaaacatgttttagaaatttctcaccttaaaaaagttagaaccagatcattcttgaaaataggcactcttaagaggtttcaactgcagatttccaagtgattttcacagattttattttcaactgtatctgaattatgaaagcattacttcagatatgtgatactttaaataaatayctttataaatgtgtttacacatgttttttgtttgtttgtatataggatgttaaatttcctcttatgttggatatgtatgaactgtgtacaccagaacttcaagagaaaatggtgtcttttcgatccaaattcaaggatctagaagataaaaaagtgaatcagcagccaaatacagtaggttcttactgctgactttatactcttaatatcttaatctcccatcagtgctcagcaattactctgtcttttttttcctgcttcrtttttccttcaraactatactttgtatagtattaataaaawtggatcaatctgtattacaattagcaggtatacacatcctccatatatcagtgcagatctttaaagttttgcatgtgttttattttcctttttttttttttgtgacaaggtcttcctttgtcactcaggctcactgcagtctcaacctcccaggcgcaaatgatcctcccacctcaccctcccaagtagctgggaccacaggcgtgcgccaccatgcccagctatttttttgtatttttggtagagacagggttttgccatgttgctgaggctagtctcgaactcctgagctcaggcgatctgcccacctaggcctcccagagtgctggggattataggcatgaggcaccacacctggcctttaggtgtattttagcatgagaaacagaactctacttagaataaatgagtcctttgtggtagaataagcttaatattttccttccccctgtaatctgtagctcatattccttttatacttatctcctcaaagtacttcacgtaaaaccttacctagtgttgaccttgatgcagtcaaaatacagtacatttccatcaccacaaagatcttgcattattgccacagggccacttttcttctgccctaccccttccttaattcctgacaactaccaacccgttcatttctataatttttgtcatttcaagaaagttggccaggcatggtggctcacgctagtaatcccaggactttgggaatctgaggcaggaggatcactttaggccaggagttcgagactgtcctgggcaacgtagtgaaaccctgtctctacaaaatatgaaaataaaaaaaatcagttggatgtggtggcatacaccggtagttctagctacttgggaggctgagatgagaggatcgcttgagaccaagagttaaatgctgtaatgagccatgattgtgccacagcactccaacctgtataacaaagcaagactctgtttctaaaaaaaaattatacaaacgaaataaaaactcttccactttttaatataacctttctcactcagcataattctctggcgactcatccagggtgttgtgcatatcagttgctccttccatttcattgctgatcagtattccctggtgtgaatttaccacaatctgcttcaccattcacctattgaagaacacctgggttgtttctagtgtttgtctgtgatgaataaacctgctgtaaacattcgtgtacaggttttaatgtaaacgtaagttccatttctctggaatgaatgcctaggaatgcagttgttagattgcatggtagttgcatgtttagtttttcaggaaactgccagatgttttctagagtggctgtaccattttacatttccaccagcaaggtgagactgattcactttctctgcattctcaccagcatttggtgttgtcactatttttcatttcagccattggataggtttatagtgatactgtgttttcctttgcaccttcctagtggctgatgaagttgagcatgtcttcatgtgtttatttgctatctgtatatcctcttttgtaaaatgcttcctcttgtcttttccctattttctaattgtactgtttttttactcttgaattttgagagttctccatattctagacctttgttggatatgtggtttgtgaatattttctcctagtctgtagcttatgttttcatcctcttaacctagggtcttttgcagaagaaagktttttttaatttttatgaaatccagtctatttttttctttagttgcttgtgctattggtgtcatatctaagaaagcattgccgggctcggcatggtggctctcacctgtaatcccagcactttaggaggctgagacaggcagatcacttgaggtcaggggttcgagaccagcctggcaaacatggtgaaaccctgtctctactaaaaatacaaaaaattagctgggtatggtggtgcggacctataatcccagctacttgggaggctgaggcaggagaatcgcttgaactggggaggcagaggttgtagtgagctgagatcacgccactgccctccagtctgggcaacattgcccagtccatgccctcagagatttatacgtatgtttttttctgagagttctgtggttttagttcttccatttaggtctttgatccattgagggttaactttttatatagtgtgaggtgtgggttcagattcattgttttgcatgtgaatatctggttgtctcagcaccattttttaagaagactgttctttgcccatcagatggtcttggaacctttgtagagattaatttgaccatctgtatttatgagtgtatttctagactattaattttattccattggtctatatgtctgtcctgatgctcataccagactgacttgattactgtagttttctaataaggcttgaaattgtgaagtatcagccttcacttttgttcttctttttgaaagttattttagctattctgagtcccttgcatttccatgtatattttaggatcagcttgtccatttcttcaaaaaagattgacggggattacacggaatctgtggatcaattaaaaagtattactatcttaatagtattaagactaatctcagcactttgggaggccaaggtgggcagattgcttgagtccagaagttggagaccagcctgggcaacatggcaaaaccctgtctccacaaaaaatacagaaattagccaggcgtggtggcgtgtgcctgtagtcccagctgttcagaaggctaaggtgggaggatcacttgagcatgggaaatggaggtcatagtgagccaaaatggtgccactgcactccagtctgagtgactgagtaagactgtgtctcaaaaaataaaaagtattaagtcttacaatccataaacttcatgtgtctttctattcatttaggtctttaatttttttcataatgttttatagttttcagtgtacaagccttggacatttttggttaaatttattcctaaatagtttattctttttgatgcttttgtaaatggcattcctttcttaatttcattgtctagagtggctagtaaagctagcatatagaaataaaattaactttgtatatggatcttaaatccttgactttgctgaatttattagctgtttttatccattagtgttttgaagagattatgtagaattggtgttaatttttttttaaacatttgatagaattggtggaacagtctgcttagagattttactttcaggagttttatttgtttattttattttattttatttttatttattttttttctattgcctaaacataggcaggcacattttcaggagtttttacatttcaaatttaatttccttcatagatatagggctattcaaatgatctatttcatattgtrtttgtttttgtaaattgttttcccagaattgatccatttcataagcttatcaaatttgtatgtagaattgtttctagtatttattacccttttgatgtctgtagagtgtttagtgagtgagatccatcccgtttcattgctgatattagtaatttgtgtttgtcccccttgcttgaggattattaattttattgatatcttcaaagaattggctttgtttcatggatttttctctattttctgtttttagttgtattgatttctgctcttatttcctttattctgcttgccttgtgatataaatttccctttcagcagtgatttcactatatcctatgaattttgatacatggtatttttattttcattctgttccttgtatttttaaaaatttatcttgagacttcctctttggccattggttatttagaagggtctaagtaattttcctgttatgtttctgttgattctagtttgatgccattgtggtgacagaacacacttacttgatttaaattctattacatttatttatttatttgagactgagtcttgctctgtcgcccaggctggagtgcataggtacgatcccggctcagtgcaacctctgcctcctgggttcaagcaattctcrtgcctcagcgtcccgagtagctgggattacaggcgagtgccaccatgcctggctaatttttgtatttttattagacacagggtttcatcatgttggccaggctggtctcgagctcctgatctcaagtgatccactcgccccggcgtaagccactatacccggcctaaattatattaaatttaaatgtgatttaggtatagactatttacatttagtgcaatcatcgacatgttagggtttaattctgcttttttgatgttttgcctttttttttttgtcttcttgtgggttacttgaactgtgttttagaatcctgttttactttatgtttttaaatgtgtttctttgtatagttttttcagtgattgctgtaggtgatttcattatctgtataaaaaagatgtgattaacctagttgccattttttgttgtggaatcctttgacttcttgccatcacagctacctgtaagctgctggcattgtcttcattaccattatagttttaaagaactttgtgctgtattcctagataagttatttttctcatgttgcatgctaaaatgagttgaagcrgtgagttcctcctaagagtccttgtctaatttaaatcatacctctttaatgtaggtaagtctttgctgaaaaatatttcagttcatttgtgctggcgtggtaagtggacatggctcaggaggtttaatacaaattgcaggaattcttgttttagaggtagttgttttttccccccacctctgtggtttgacagtattttggtaacactggggaattgggtttttccttttctgccctagagcactgtttaactgtactgctgtattcactggtacgctttcactttaatggtttaaaattggtcatcacattcagggtgtctgttactgtactgtaacaagattttatattgttgaagtgtaggactgctgggtttacagttttaactgtggttatatcattttagtaatttggaaggtagactgtattttgtctctgtgcactgtagacagtaaatatttatgaaattgaacacttacagagaattcaaattttatttccaaaatcatgatttaaaattaaacatttttttctcctcagagtgacaaaaagagtagtccccagaaagaagttaagtatgaacccttttcttttgctgatggtaagtaacattctcattttaattgagttattgtatgtgggtctttttaaggtaaaatttacatcttaccccatatttacttattctgatgtgcttttcaaacaaaatgtcaggtttcttgaacaatttaccttaatgacatatagtaaatttactcattggcatacagttctatgagtaagttacttattaaaacatcaatcatgaagccttaactatgattggacagtagtatcttattggattctgataatactttcgtaatgtgaactttrgagttattcttgttacttagcttgagaaggcacatgtctattcattgtctaatattaatggatttacatctttctttagatattggctccartaattgtggatactatgacttacaagcagtactaacacaccagggaaggtctagttcttcaggtcattatgtatcatgggtgaaaaggaaacaaggtaaagggtattcttttttcaactgttcaatattattttaacagttcatttattataaattttatagcagtgtggttttcaaactttgggtctcagaaccactttacattcttgaagccccaaagagctttggtttatgaggtttgcctctcttaatacttactgtattagaaattaaaactgagaaattaagaaagttagttttaaaaatgatagtaataagcccattacatattaatgtaaaaacaaaatgagtgagaaatggtactgatttacatttttatgtctttctgttgtctggcttaaataggaggcagctgggttctcctgttagtgttcgcattcagtctgttgcattatcatacattatgtagcctctggaaaattccagagtacacttgagagaatgtgggtggaaaaggcaagcagtgctctagtggtgtcattgaagtagttgtaacctggtggaacccctgcagtgcccttaagcctgtgtggtcactgggtcgcacttggaggactgttggtgtggccagtggagcactgctgtgcctccgatgacttgatactttttttgcagtggaactctgagacgaatcctgcataacattaattcatcttcttgtccctgttatttagatgaatggattaagtttgatgatgacaaagtcagcatcgtaacaccagaagatatcttacggctttctggtggtggagactggcatatcgcttacgttctactctatgggcctcgcagagttgaaataatggaagaggaaagtgaacagtaatcttcattttagtatttatgcttagatgtgaaaataaatgttatttgttgatcatttctataatccagagctttagaggaagacacataggtgggtttatgtttcacctcatttggaacaaaagaggacagaagcagaccactctgtgcaccaacctaaaaaattacagagaagagaaaattatctttggattgtgctgccctatataaaggtggcagaaagacatttttaaaaagcttattatttcttgcattattttaaaaagttcagagttgaaatgcctttcaaccatttccttctgtggtcatttttcttgctgcctttttcacccaagattcagcagtcagatgtttactgcacacctattacctattatttgctgttcttgcatggttcaaaccaccattctgtagccacccatcctttgccttatctaacaaacatttttccaggaaggtggaaaaggaagtgttgctctcattgtgtgactcagtgctgctgtccatcccatggaaacatgggcacaatcaagtatttgtccagcctattgcaggcttttcctgactttaaaataaattgtratcaataatagtacctttgattatacatttattattgtgtctctctctgatgtactgtggattgtacatttaactttggaatggctttgtaataatcagtcttaagaaaatgttgacaagctctggttgcttatttttagaaaatgaggacatttaataataataaaaaaaaagggattaatagcttttgacctcaagtcttttgtcttctgagtgttggagcttggctgaagacatgtttaatactgtacaatttctgaagatggttattaacactgtgctgttaagcatccatttaaaaatatttgttatcttctttgcctgcctgtattttaaaaagaaatacaaagttgtaaaagtaatggatttctttggatgctgaatgcagtgatgttatcagtcagattctttccttggctcagttgtgtttgtatttcctttcttaattccccaaatcttggctgggcacggtggctcacgcctgtaatcccagcactttgggaggctgaggcaggtggttcactggaggttgagttcgagaccagcctggccacatggtgaaaccctgtctctactaaagatataaaaattagctggatgtggtggtgcacacctgtgatcccagctacttgggaggctgaggtgggagaattgcttgaacctggaaggcagaagttgcagtgagctgagatcacaccactgcactccagcctgggtgacagagagactctgtctcaaaaaaaaaaagaaaaaattcccaaatcttaatgtctgtttcagaattttagtgattttaaagtgatagtagaaaataccaagcatatgaggtatttcaatatgataggcttcttacattttaatagttactcatctttgttccaggacccttgmctgatgctagggaaaggataaagcatagaataccagccagtttggctctgattttgagttatttataataaagtttggggattatcataacatctcatatctttgtgtatgttgttttaatgctcggcagagcacaacactgatgataactattaaaaatagaaaataacagccattttactttcaaatctgatgtgatgcaatctgtgaacactaggaggggataaaataagcattgcagggaaacttatttgtaaatagcttcctcacctaaactttgacttggcaatcaatactttctactttgtggaggggattaagaatagaatgggcaggatgagaccatgaaaattataatgattcatgtatwtttgtatgatgcttgtaactttgcaaagtcttttttattcattgtctcatttggtcagaacaattttattgaggacatgaatttaacaattagaatttagattttctgactgtagctactaaatgttgtagctactagaccaggtgagctaggtttagagcaaagtatataagccttgtatggactatattagaattttaaaaattgtaattaattccttatcatcattataaaaagcttgatttttttatttgatctaaaaaagcattattccaaagaattttttcaagtagaaatgggagttagttataccagtgttgtttttaactaataaggctattttagaattcagccttgcctgtaaggtctttgagaagggagaggagtaggccaaaaaaaaaaaagtcttgattcctgaatgtgccttatatgctgtgccactcacaccgaggccatcatctcaacattagagttgtgctagattactgcttgactgactagctaggttaggcctaagagtgtttaccgaataatctgcactcactcagtagcccttcttcaggattaaaaacgatgatgacctcatcttagagccctaaagggaaatgcttatgtgggaacaagaaaagtcggtggtactgtcttctgctactactacytagtgctttgctgtgtatagggtgtgttcacatatatctcarttgaatgtcacaagaatccctgaagtgattaaaagtcttgagaggtcaggcaatttttgtaaggctagaaggaaaagtgaggttttagacttcatttcttttaaagttggcaaacaaacattttctgtaatggacaagatagatagattagatagatagatagatagatagatgatgattgattgadgattgatwgtaaattatttcaggctttgcaggctataaagtgctgcagctccttagctttgctgttgttatagtgtagctggagccatagacagttagttagttagttatgagtgagcacagctgggtgccagtacaattttaatgatcaagactcgtggcaggcagaacaaaccatcatttgttgatcctctgcttgaaagcacgaataagtgagaacagagcagtcatatggtttcagaaagtgttattctgggatttcaggataaattttgtaaaactastaacaaacaacacacaggaaactaatttggtataagaaacgacatatccctaaatagtgcttatttaacttcattataaatacatctacttaacaaaaaaatatattttgtgatcttgaggtcacttcgtttaggtcattatctcaacccaacctccccaaactctggtttgagccaatatgtgttctrttgttctcagagcaccagccgactgtacaacaattgttataaaaatgtttattgtttaccaaaaccagtggacctcttatcaaatgctgcttggtaacaaaatctatcacagttttaataaaaagaaaaaaaaaagaagctaactatttgtctcattgtcattagttagactttctgcaaggtcacttaatccagacttattcagtgcattaatcagattctcaggtgttgcatgaactccctcttgatcttgccaggcaaccaggagctgcttagctctcatcttcatgtcttcactgtcacactcaatctgcctaatttctgagtctttcatttccaagtagggagccagaatcttccattgttcacccagcttgttggcaaatacctctatttgttctcctgttacaggtttgtctcgccgaacatcaggacctagaaaatgaagagaatataaattatgcgcaattctaagtatacaacagaaatggaaagctatggggccaataagttttattaaccacctttagtagactttattttaaaagtaaacaattattttttatattctccgtaagttgaataccactcttaataagcatggtcaataatcaaagctaaagctgttacctataattacgtaggctttccctgaaatgaggtgctccccctccaataaccaataattaacagaggtatgggtcgccttcaaatgtattttcattcccttttaaagcaccattacttcccaattttattgcataaaatgtagtgtttttaaagttattattaagcaatgttttaaattcctcactatgtcagaaacagttgagataaaatgggagaagttgagaagtcgatcaaattaaataatgtacctatcaacaaagaaccccaatcgtcttcaattttgttaaataaccaagaaaattcagttcttactttcattttccttcagtagagcatcattatcttcctcatcttcatcctcacctgtttttatttcttcagaaggaggctaaaaatgagaaagaagaatgtttgaaagaatgccagcctctgaagtaaggtaacaggtattttgtttggataaggacggttgtgagattccaagtacagggtgccagaacctcacccctgagagcgttaaatgacagtgtcaggtaaggatcctaagtgggactatcttcacctgcagaaggagtgaacttgggaagacctcagagttggaaagactccccacccccaatctgggaagcaggaagtcagtaaaaagcacagttccaggatttgcaaatacccagggtttatttagtaaagacggcctcaaggaagccagtagcaacagtgtccttaaaagtttctgattcttatcttttatctttgataaaagacaatataatgcattggcaaacaggaaaaaattcatgtctgtgtgtataggtgcataacagtttacctgaagtatcacgaactttaattttttgagacggagtcttgcttggttgccaggctggagtgcagtggcgagatctcggctcactgcaacctccgcctcccaggttcaagcaattcccttgcctcagcctcttgagtagctgggactacaggcacgtgccaccacacctggctaattttttatattttagtagagacggggtttcaccatattggccaggatggtctcaatctcttgacctcatgatccacccgcctcggcctcccaaagtgctgggattacagtcgtgagccaccgcacccacagccctgttgaactttaaattacatgctgtacagaaaattatcagttacttctttatcaactcatgtatttcctgtaaatgtatattccaatgtgtttttccctcattctaaaacatgggagcttgtggatcactggtttttcacatgattaagtcagttttttgctcacatagtgacagcaattttaaagaagatgtcaactaaagggtatgaaaagttgatctatggtacttaccggtaattccttggctagctttattaccatattttcaagatattctggtaaacttttaaactgctggttggttggctggaagaagtgagggcttctccgtgctaatagtctcagggctctccaaccataatttgaattgttcacagccctataaaaagaggtgtcaggcttgtaatttatagctttgtatttctgtattcccttctgctcagttctgccatgtgtaattctgtatttaaggtaaatagctcaaagtgccattctttgtatttgaatcttattcctaaagaacttttcagtatgtagtccactgataataacaaaccaatagatgcacatgtaactaatcacaggaaccaacaatgcctgaagaggcaggctcatatgcagcaaacacattttcaaagtttccgttcattttgtttaattttaacaagtcaacaagtgtgtgcagtactggctggatgcagtacgtatacaacaggaatcatccatctagctatttggaatccatgaactgttccctaatgaagtataacaatgatcagggtggtataccatcaggtgagaaacaaactgcagagaaattctaaagataatgcgtcagaaatatgcaatgctgcggaagaaaccaaaccacaaatttattccatttaagagttttggattggaagtctcttcctcccctaagaatagcaatttggtttatttggtcacctcttataaataagcatatgttacctttaggatgtgcaggtaccactgaagacttaacaaaaactacccatagacactggggactcttcccaagttaacacctgctgtgaggctttgcctaaacagttaagagccttcctctctgacatatctgtttagacaatttgattattttaggcattttcaaaattcactgtcaattatacacatcatttttcttattctccacaaaaccctctttggagataataatttgaactatcactttaggaatgagtccacctagtcttatgtaacagtgataaattaatattctttcaatcgacaaacacttttgagccaggcactcagtagctgtggagagtacctgaggcacagtaaggcaggcattgctagtgataaacacacaaggtataagacaatttcataaggatgaggaaaacttgagaaatgagaaagtggtaagtgccaccttctcatttggatagtggtaagtgccgtgaaataaaaaccacgagaatgcaaaagaggagaccagggaggggaagagcttcccagccagggggactttaagccacggcaaccttggggaaaaagtggttcaagcaagtgagacagtaaagtgtgaaggtcctgacaggaaagggaaagacaggaccaagaagcctgctgtggttaaagcagaggggaggcatggccacacaggagagtatgagccagaccaaggaggtcttttaggccctgggaaggagtttggaataggcactcactgggagattttaagcagattagacttggacaattattttaaagatcactggctgatgcatggagcactgaccacaactagagagattagttaagaggtcacagtaattaacaactctggtcacagggtcacactagtcacaaatactgagtgctaaccacatgccctgtagggttcaaagtgcactgtcttatttaatcctcagaataaccctgtgaaatgggtactgttactatttaacagatgaggaaagggaactggcggtttaattattaaattagccttagttgcctagtaagtaagtggtagaggggatcgaacctatgcattctgaccagaggcctcttgcctttaaaccactactcttcaattcctatttaaagccatgagactgtggtgtcacccagaaggttctagataaagaggctaagaccaattcctgatgttactccaaaatttgagttaggcagaggatgaggaggctgaaatggaatgtgaggtggagtgggcaacgagggcaaagggcaaacagaagaaccatggatttggattctcatggacgccaagagaagaaaacattaaggggaacaggataggttaacagctgctgtgagatactgtgctttgaagggtagagagaacagaactaatagttggagagaaatggggatcagggggagttttttttttcttatattttgaaacaagggtgattccaagtcacgcttagttaacaggaataatccttgaaatcaggatgtgtactaacaagaacttggaacataaactcacctaagagaaaaagcactattctatctactgcctctcttaagaggctttctagtatacacacaattcctaaggaagaaacaaattgaagaaaattaaaaggagctaatgaggagcatacttacttatattcattttccaccatattttcagggtctgcctgttcaatggcttcttcaaagaattcctccaaagtgggcatgtgttccctgagcggtacaaaaataaccagtgaggatggcatatattcttaataataaatactcataaagtggtggcaggacaagattgtgggcatgtgttccctgagcggtacaaaaataaccagtgaggatggcatatactcttaataataaatactcataaagtggtggcaggacaagattgtgggcatgtgttccctgagcggtacaaaataaccagtgaggatggcatatactcttaataataaatactcataaagtggtggcaggacaagattgtgggcatgtgttccctgagcggtacaaaataaccagtgaggatggcatatactcttaataataaatactcataaagtggtggcaggacaagattgtgggcatgtgttccctgagcggtacaaaaataaccagtgaggatggcatatactcttaataataaatactcataaagtggtggcaggacaagattgtgggcatgtgttccctgagcggtacaaaataaccagtgaggatggcatatactcttaataataaatactcataaagtggtggcaggacaagattctaatggccccatacttttagttacagttttgattacgtgggaactccagacttttaaggaagtaaaaccgtcaaaactaaattcaaaaaggacaataaataaaggggatagtctaatactaaatattacatagtatttactacatataatattatatactttaattacacactataatatataaatatgttgctattcaaagagggcagccagggtattttatagcatttgaattttaccagcaaataaacttttacattaagtccctatccacgaattattttttctttaaaccagaattaaaccaaaactaataatcagaccataatacgatttcaagggtttaacctttagctcttatttaaattgttaccatggtagcatggttgatttttaaaatgcatctttcttgaatttgtttttagaaataaaattttgatacagggtcaagcaaagaaatgaggtctcaggatcagaagacatcttctagagtaaaactaggaaaatgggctcttttaagaaaactatcccaatatccattcattttctaatgctacagatactatattccattttatgaacatgccccaagttatccatgtcctacacagagatatttgtcttcccactctttgctctgacaatgttaaatgaacattcttgcacctgtctccttgtagatgaactgatttctttaggcactgggccttcaaacttccactgcaacccacaataagaaattcattttacactgcaacccagtacacacatatatgcaagtatatgtacagatatatataagtaaagctaatgcttcacaaaagtatatttcctatttcatttaaaaaatgctagttgaaattactaaattgactttacaaaccaccaatgattctcaaacttagtttttaaaaacactattctgatcaacacacctactagtggggcacagacatctttaacattcagatagagtgactgtgccatcagactcctaccagcagcactggcaaattatttttatccataattcttataaaatctgggtatttttaaattactgaatctcttagctggaaactgct

SEQ ID NO: 94423 - DNA, 24486 bp, Homo sapiens
  misc_feature (1)...(24486): n = A,T,C or G
cttcaagaatgaagctgcagacccttgcggtgagtgttacagttctcaaaggtggcgtgtccagagtttgttccttctgatgttcggatgtgttcagagtttgttccttctggtggctgcgtggtcttgctggctcaggagtgaagctgcagaccaccgcgagtattacagcttttaaagcactgcatctagagtttttggttcctccaagtgggttcgtggtcttgctggcttcagcagaccttcacggtgagcgttacagctcacaaaggcaatgcggacccaaagagtaagcaataacaatatttaccgcaacgactaaaagaacaaacctctcacgacatacaaatggacccaaccgggttgccactgctagctctggcagcctgcttttattctcttacctggccccacccacatcctgctgattggtccattttacagagagcccattggtccattttacagagagctgattggtccgttttgacagggtgctgattggtgtgtttacaatccctgagctaaacacaaaggttctccaagtccccaccagagtagctagatacagagtgtcgattggtgcattcacaaaccctgagctagacacagggtgctgattggtgtgtttacaaaccttgagctagatacagagtgccaattggtgtatttacaatcccttacctagacataaaggttctccaagtccccaccagacttaggagcccagctggcttcacccagtggatcctgcaccggggcgcaggtggagctgcctgccagtcccgcaccctgcacctgcactcctcagccctcaggtggttgatgggactgggcgcagtggagcagggggtggcgctcgtcggggaggctcgggtggcacaggagcccacggaagaggggggaggctcaggcatggcgggctgcagctcctgggccctgcccggctgggaggcagctaaggccctgcgagaaattgagcacagcagctgctggcccaggtgataagcccctcactgccctgggcttgcaggccggctgagcccacgcccacccggaacttgtgctagcccacaagcgccacggcagccccggttcccgcccgcacctctccctccacacctccctgcaagctgagggagccggctctggccttggccagcccagaaaggggctcccacagtgcagccgcatgctggacagctcctcaagcgtggccagagtggtggccaaggccaaggaggtgccgagagtgagcgagggccgcgagggctgccagcacattgtcacctctcagaagtacaaattaaacgtcaataagataccactatacatcaattagaatggctaaaatttttttatttttaaagaacaaaaccccaggccaggcgcggtggctcacgcttgtaatcccagcactttgggaggccgaggtgggcggatcacaaggtcaggagatcgagaccatcctggctaacacggtgaaaccccgtctctactaaagatacgaaaagttagctgggcgtggtggcgggcgcctgtagccccagctacttgggaggctgaggcaggagaatgacatgaaccccggaggtggaggttgcagtgagccgagattgtgccactgtactccagcctgggcggcagagcgagactgtctcaaaaaaaaaaaaaagaacaaaacctcaaatctgataataccaactgtagacaagaatgtggagcaactggaacagtcatacattgctggtgagaatgcaaaatgatacaactgctctggggaaacaggttagcaatttctcatgaagttaaacatgtactttgtgtttgacctagcaatctcctaggtgattctcacccaagagaaacaaaacttatgtttgcaagaaacctgtacactaatgtatatagcaactttataattgctaaaaactggaaacaaaccaatatcttgcagttggtaagtagatagtatggaatacccttggcaataaaaatgagtaagttattatatactacaacttggatgaatctcaaatgcattatgctaagtgaaaaaaagccaaactcataaggctacatatgatacgattttgttgtgtgacattctggaaaggcaaaactatagggacacaagacagacagaccagtgcttgccagggattaacagtggaagcagggtttgaccatgaaggagttttgggggtgacaagatactctggtttttttttttttcttgagacagagtctcgctttgtcgcccaggctggagtgcagtggcacgatctcagctcattgcaaaaactggaaacgaagtaaatatggcaacatgctaattacatgtgacattatcagtatttgctttattattggacttgtatattttaattggtcgacatacaaacaaggcaaaatatatcccccttagagaaaatttggaaaagacagaaaaggagatagaacaagtcaccagttgtctttatttatttattgaaacggagtctcgctctgtcgcccaggctggagtccggtggcgccatctccgcttactgcaagctctgcctctcgggttcatgccattctcccgcctcagcctcccgagtagctgggactacaggcgcccaccaccatgcccggctaattttgtttttgtatttttagtggagacagggtttcactgggttagccaggatggtcttgatctcttgacctcgtgatccacttgctttggcctcacaaagtgctgggattacaggcgtgagccactgcgcccggcccaccggttgtctttagacattgtattttttattcttttctacatgtctttttgcctaatgaaaagtgtactgtaagaaaaattttgcctgtgtattctaaacttgtttcctttgcaactttttcttttcttttttcttttttgagacagagtctcgctctgttacccaggctaaagtgcagtgtcgcgatcacagttcactgcagccttgaccttcctgagctcaggtgatcctccagcctcagcctcctgagcagctgggactacaggtgcacccacgcccggctaattttttgtattttttgtagagacaggatttcatcatgtcgcccagcctagtgtcgagctcctcagctcaagttatccgcccacctcggcctcccaaagtgccgggattacaggcacaagccaccgtgcttggccaccccttcctcttaaatgatctttgaaacattatttgcagtctcaaagcctgcatttatctaaacaactggtttcattttagggatgtaggcatttctgtaatattaaactgttatatttcacctcgctagcatgggagtaaaactgaggggatgtttgcatgaatcttgtgaattatgatggctctaagccattgtaatttgattaacagaagtcctactttggggtttatcttatttttattatttatttattttttgagtggagtctcactctgttgcccaggctggagtgcagtggtgctatctgggctcactgcaacctctgcctctggggtttaagtgattctcctgcctcagcatcccgagtagctgggattacaggcgcaggccaccatgctggctaattttttgtatttttagtagagatgggatttcaccatgtcggccaggctggtcacaaactcctgacctcaagtgatctgctcaccttggcctcccaaagtgctgggattacaggcatgagccactgcgtctggcctactttgggatttttctctacagtgttttcatgttgttaatgtagctgggggtccagcatcactgctggtcacttaatcctgctggaggccaccaggatacaccatctctgtgcagtgagctgtcaaggagagccctaggcaaaattacttaggttcatggtgtcagtgcttttgtggagatatccaactcctgaggttcactcatactgtcattttctcctaaggcatcaggtgatgagcctctctgatccagcattttgactacccttttcacatttttttttttttctgagacagagtctggctctgttgcccaggctggagtgcagtggcatgatcacggcttactgcagcctcaacctcccaggctcaagtgatcctcctgcttcagcctcctgagtagctgggactacaggtgcacgccactatgcctggctaattctttcattttttatagagacaggacctcgctatgttgcccaggctggttccaactcctgaactcaagtgatccacctgccttgggctcccaaaatctcgggattacaggcgtatagtgctaggccttcacattcttatatacccttctgtttccttagctgtgaaatggagataatgacatagccttaattcacgtgggatgcttagcacagtgtctggcacttgatagatttttttctttctacttgaaatttatttttgagctgggcacggtggctcacacctgtaatcccagcacttgggaaaaccaaggcaggcagattacctgaggtgaggagttcaagaccagcctggcaaacatggtgaaaccccgtctctactaaaagtacaaaaattacctgggtgtggtggcacacacctgtaatcccagctactccagaggctgaggcacgataatcacttgaactcggcagatggaggttgcagtgagctgagactgagccactgcactccagcctgggtgataaagcgagactgtctaaaaaaaaattatttttaactaatataaaactctctgaacccttctttttctgagctgcttctccacttgagtccatcccacatcattgaacatttaattacacagaattgtgtaccatcttccttgacccccagatctttagccttctatagtaccctgtctctttttgtcgtactagtcacagttgcacttttttttttttttttttgagacagagtctcattctgtcacccaggctgcagtgcagtagcacaatctcagctcactgcaacctccgcctcccgggttcaagcaattctcctgcctcagcctcctaagtagctgggattacatgcgcgcaccaccacgccaggctaatttttgtatttttagtagagacgaggtttcaccatgttgtcaggctggtctagaactcctgaccttgtgatcagcccacttcagcctcccaaagtactgggattacaggcatgagccactgcacccggccatagttgctattttatttgtgtgattgattaccgtatgacgcttttattgaagtgcagtgaaggcaggaaacatgaccggtttttacaatattttcaacacttatcaccataggtggtacatagtagggccttaataaatatttgtaaaatgaacaaagttaatgagtgtttatgtttgtagttttaattgctctgaagtaaatatctgattttccaatttccaccagagtgctctgcacatagtaggtctaattatttttccctctttactaatcacccatgccttgtaagaattcagttagttgactttttgtactttataagcgtgatgattgggtgttcccgtgtgagatgcgccaccctcgaaccttgttacgacgtcggcacattgcgcgtctgacatgaagaaaaaaaaaattcagttagtccaccaggcacagtggctaaggcctgtaatccctgcactttgagaggccaaggcaggaggatcacttgaacccaggagttcgagaccagcctaggcaacatagcgagactccgtttcaaacaacaaataaaaataattagtcgggcatggtggtgcgcgcctacagtaccaactactcgggaggctgaggcgagacgatcgcttgagccagggaggtcaaggctgcagtgagccaagctcgcgccactgcactccagcccgggcgacagagtgagaccctgtctcaaaaaaaaaaaaaacaccaaaccttagaggggcgaaaaaaaattttatagtggaaatacagtaacgagttggcctagcctcgcctccgttacaacrgcctacggtgctggaggatccttctgcgcacgcgcacagcctccggccggctatttccgcgagcgcgttccatcctctaccgagcgcgcgcgaagactacggaggtcgactcgggagygcgcacgcagctccgccccgcgtccgacccgcggatcccgcggcgtccggcccgggtggtctggatcgcggagggaatgccccggagggcggagaactgggacgaggccgaggtaggcgcggaggaggcaggcgtcgaagagtacggccytgaagaagacggcggsgaggagtcgggcgccgaggagycsggcccggaagagtccggcccgkaggaactgggcgccgaggaggagatggaggccgggcggccgcggcccgtgcygcscknggtgaactvgcgckagccctccyaggkcatcwystgcmntcscrdkycgsgcgtcktgcygbbcgtawsvcycwwcttcgacnrckagccgymgccsyrcccaacgctgccgcctggcacgggcssccgcatccacadshamygabgtacgggcccggcgcttaggcccgacccagcagggacgatagcacggtctgaagcccctctaccgccccggggtccattttgcagacggggaactgaggccccttgaggcaggacacatccagggtgacgctgctcgtaagcgtcagagcattcttttwwttttttttttttttctgagacggagtctcgctctgtcgcccaggctggagtgcagtggcgcgatctcgactcactgcagcctccgcctcccgggttcaagcgattctcctgcctcagcctcctgagtagctgggattacaggcgtgcgccaccgcgcccggctgatttttatatttttagtagagacggggtttcaccatgttggtcaggctggtctcgaactrctgacctcgtgatccgcccgcctcggcctcccaaagtgctgggcttatgggcatgagcctccgcgcccggcccagagcattctttataaggccgaatagtttgcatttgaaggtggctccccccagtcccccaccccacgtgtattttcccctcaaagaaaagctgcatccttaacaccccatctgttcagtcctcatgactccagtgggccagttctgcgtagtccctgccctcgtggagaacacattcctcctggggagactgacagatgcaaagacaggaacaagccagggtcatgttggcgccggaagagccgaccgtgtgtggcgtgggaaattgacttacctgcctgctgggagatggaggggttgcggttgtgtggtttcagttaaggagcacttcccggagaaggaagagagcaggatggagtaggaactagccaaccctaggtaagaggttctagacatgcgtgcgttgagacctggagtcttgggagaggatgcttaaaaggtgattttacccctaggaatatgggggcactgaaatttttttttttttttgagacgggagtcttgctctgcaagctggagtgcagtggcccacgctagratgcagtggcgcgattgcggctcattgcaacatctgccacctggggtcaagtggttctcttgcctcagcctcccgaggagcggggattacwggcgtgcgccaccactcctggctaattttttttttagtagagacgggggtttcgtcattttggcyaggctggtctcgaactcctgacctcagatgatccacccgccttggcctcccaaagtgctgagattacaggtgtaagccactgcgcccagccctttgaaagtttttcagtatttatgtatatatatttttgagttggagtctggatctgtcgccagactggagtgctgttgcacaatcttggctcactgcaatctcggactcctggttcaagcgattctcctgcctcagccccccgcgtarctgggactacaagcacccaccaccaagcctggctaattttttgtattcttagtagagacagggtttcaccatgttggccaggatggtctccrtctcctgcgctcgtgatctgcctgcttcggcctcccaaagtgctgggattacaggcgtgctgggatttcggccacaacgtccgaccgaaagtttttaagcagggacatgacattgtcagatttatatactgaaaagctcacccaggttgccaagtggtttggaggggaaagactgctgtcgaggaagcagttaggtagttgtgaaaacccaggtgaggaataactaggccttacctaaggtgcaggcagtaatcttgccatggcctttaagcagagaagtagtcctagtgtcacttaatctttacaaaggatttttgcaaggatcccgatctttcttccttgagggtggtgtacttaatacacttttacaccagacttctaatgttagatgaagaacacagtatttccagggatcaacatttctgtaggctcctattttatataggaaattgtatgaattttgtattttactccaaaatttttctgtgcccgatttaatataaaaatttactgagcctgggtgcagtggctcatgcctgtgatctcagcactttgggaggctgaggcaggaggatttcttgagcccaggagctggagaccagcctgtgcaacatagtgagaccctgtctgtatttaaaaaaaaaaaaaattcttgaaaaattagcagggcacattcctgcctttagtcccagctacttgggaagctgaggcaggaagatcacccgaacccaggagttggaggctacagtgaactatgatggtgcctctgaatagttgctgtactctagtctggtaacacagcaagaccctgtctctctatcttgtcttttttttttttttttttgagacaggatgtcctgcwgttgcctgggctggagtgtggaggctggagtttggtggcatgatcacggctcattgcacccttaacctgggctcaagcagtcctcccagagcttcagcttcccaaagtagctgggactataggcatgctccactatgtctggctaatttctttttttatttttatttttagtagagatgaggtcttgctatgttgcccaggctgagacctcatctcttttttatttttttwaaattttttattatactttaagttctagggtacatgtgcacaacgtgcaggtttgttacatatgtawacatgtgccatgttggtgtgctgcacccatagagacctcgtcttaaaaaaagaaaataacattacttttgaaggtacttaatgcactgaattgtacatttaaaaatggttaaaatggtaaatgtttgaggcaggtagatccacctgaggtcaggagttcaagaccagcctgaccaatatggtggaaccctgtctctgctaaaaatacaaaagttagctgcatgtggtggcatgcgcctgtttagtcccagctactcgggaggctgaggcaggagaattgcttgaacctgggaggcggaggtggcagtgagccaagatcacaccactacactccagcctgggcaacagagcaagactccatctctaaataataaataaaatggtaacttttatgtatattttaccaaaatttaaaaaattacaagtttacatttcttaaaatttcccatcaaatctgtaagtaaatttatgccccgaggaacaagtgctatatttattctragacaacctcctccttccttaaacagaatcttagggctggaggattgcttcctgccctcttttgtttgtgatgtatgcattttgaaaattctgggccrggcgcagtggctcactcctgtaatcccagcactttgggaggccgaggcgggcggatcayaagatcaggagattgagaccatcctggctaatacggtgaaaccctgtctctactgaaaataacaaaaaattagccgggcgtggtggcgggcacctgtggtcccagctatttgggaggctgtggcaggagaatggcataaacctgggaggcggagcttgcagtgagccgagatcgtgccactgcactccagcctgggcgacagagcaagactgcatctcaaaaaaaaaaaaaagaaaaagaaaagaaaattctggtataatttacatacagtaaaatgcacagatcttagggtttgatgagttttctctcgacatgtttttgcacttccttgtttttgagaagcactgatttgagaagtcagtggctttttctctttagtttgcagggtttgctgtgatttgtaatcacgtacttgacctaggcttcccttttccaccatggtagcagaaagggcatgggattkagagctttaagtacgcgctctttgcttactgtcttataccttgagcatgtcacttctctcagacttgttttctcatctgtaaatggatctgttgtgaggactgactgagataatgttactagaagggctttgtataatatttaagcagagtgagaggtaagctttttgtgtaggtcaggggaaatggagaaaataggtgccctgactcagaccagtctggctctttttttttttttttttggagacggagtcttgctctgtcacccaggctggagtgcagtggcgcgatctcggctcacggcaagctccacctcctgggttcacaccattctcctgcctcagcctcccgagtagctgggactacaggcgctcgccaccacacctggctaatttttttgtatttttagtagagacgaggtttcaccacgttagccaggacggtcttgatctcctgacctcatgatccgcctgcctcggcctcccaaagtgctgggattacaggtgtgggccaccgtgcccagccaccggtgtggctctttaacaacctttgcttgtcccgataggtbrmstttrdcbctysrgagrtgcagggacacacgatgggyttctgsttavcymaactgaatwatbtgtgccatctctcaatgttgacggacagcctayttttdccaataycacactgcyaggtactgacgttttactttttaaaaagataaggttgttgtggtaagtacaggatagaccacttgaaaaattaagcccagttctcaatttttgcctgatgtcaggcacgktatccaatctttttgtatcctattctctaccataaataaaatggaagtgatgtatttgtacgttatgtgttaaaggtgttatggtgtctcaaaagcactttgggctcttaagagacaagcgaaattaaagtatcatatcataggttagttttgtagaattgtagaattacgaatgccttttgtttccctggccaaattgtgccctggagttccaggagaacaatgtgtagagcatgagatattttggcttatttgttgctgacttctaattttttttatttttttgagacagaatctcgctgtgttagctaggctggagtgcagtggcgcaatctcggctcactgcaacctccgcctactgggttccagtgattctcttgtctcagcctcccgagtagctgggactacaggcgtgtgccacccactctgataattttttgtatttttagtagagacggggtttcaccgtgttagccaggatggtctccatctcctgacctcatgatctgcccgcctacgcctcccaaagtgctgggattacaggcatcagccacagcacctggcctatgtattttcaatttaacacaatcaagctcacagtgccaatcagaggtgttttttttttttttatttttatttttagagagtctcacagtgtcatccaggctggagtgcagtggtgcgatttcagctcactgcaacctctgcatcctgggttcaagtgattctcctgcctcagcctcctgggtagctggggttataggtgcctgtcaccacacctggctaatttttgtatttttagtagagatgaggtttcaccatgttggccaggctgatcttgaactcctgacctcaggtgatctgcccacctcagcctcccaaagtgctgggattacaggcgtgagccactgcgtccagcctgtttttttttttttttaaatcattgaagattggtataatacttcactatttgtttgaagctcaaatgattttatcagggtaaaccctaataaactgatgttcctgtgggtaaaaaaaacctcactaaagaccagcagtgtgtggtggctcctgcctgtaatcatgcctgtaattccagcacttagggaggctatggcgggagggtcgcttgagaccaggagttcttgaccagcctggacaacaaagtgagaccccagctccacaaaaaaatttttttttaattacctgggcatcttagcatatgcctgtggtcacagctatttgggaggcttaggtgggaggatcccttgagcccaggagtttgaggctgcagtgagccatgatcataccactgcactccagcccaggtgamagagtgagatcctgtctcaaaaaaagaaaaaaaaaactcaaaaaccccccaaatacatgggtttcataggattcaaactactatgtgtgtatagatcctgttttaaggaagtagatatataaaaatgagcattgctaagttaaatttggtaaatttgccttatagaayaccctcgagtacgtttccagtgagtgtaaaataggaattgggatacccaattcagttgtactagattttctttttttttttttttttgagacggagtctcgctctgtcgcccaggctggagtgcagtggcgggatctcggctcactgcaagctccgcctcccgggttcacgccattctcctgcctcagcctcccaagtagctgggactacaggcgcccrccactacgccmggctaattttttgtatttttagtagagayggggtttcaccgttttagccrggatggtctcgatctcctgacctcgtgatccgcccgcctcggcctcccaaagtgctgggattacaggcgtgagccaccgcgcccggcctagattttctaagtacacattgttttggttatgtgttttgtgactaccaccccaaaactaataaccacctttttttttttttttgagacagagtctcactgtgtcacccaggctggagtgcagtggcgtgtgatcttggctcactgcaacctctgcctctcgggttcaagcgattctcctgcttcagcagctgggactacaggtgtgcaccaccaagcctggctaattttttgcattttagtggagacgggggtttcaccatgttgaccaggctgatcttraactcttgagctcaggcagtctgcctgcctcagcctcctaaagtgctaggattacaggcgtgagccactgcgcccagcccaccrttttatttgttcataattctgtagtccaggctgggctcagctaggcagttactctgctggtggtagtcgttggtgtggctgccttttgctggcagctgggggctgggcctgtccctcttttttttttttctcttttcttttttcttttttttcaagatagggtctcactctgtcacccaggttggagtgcagtggcatgatcttagctcactgcaacctctgcctccagggctcaagtgatcctcccacctcagcctccccagtcgctgggaccacaggcatgtgccaccatgcctggctaattttttgtgtattttgtagagacggggtttcgccatgttgccaggctggtctcgaactcctgagctcaggcgatctactgacgttggcctcccaaagtgttgggatcacaggcatgaaccaccatgcctggccagggcctgttcctctttatgtggtctctctagcagggtagctcagggctttcaaaagtataaaagcagaagtcagcaggcctttttaaggcttcggcctagaattgccagtgtcgcttcatcsacattcagttagttaaagcaatcacaagcccagcccatttcaaggtgaaattactacagaggcatgaacaccatgaggtgtccatagggggccatcagcataacacactgccacatacatgcactcactttttttctttaacctaaagtgagatccatcagtagtacaggtagttgttggcaaagcctcttgttcgttccttgtactgagaccctagtctgccactgaggatttggtttttgcccttccagtgwrkaytsygraagagbvaygcctccaggttgtccggagccyakdcaagcctkagaatkasaggwgacnggacrtcgtcaggtmgcbctasdaagatshggaagaccacccaaatgtgyagaaagaccdggagyggctgacacaggagcgcattgcacatcaacggatgggagattgaagatttctgttgaaacttacactgtttcatctcagcttttgatggtactgatgagtcttgatctagatacaggactggttccttccttagtttcaaagtgtctcattctcagagtaaaataggcaccattgcttaaaagaaagttaactgacttcactaggcattgtgatgtttaggggcaaacatcacaaaatgtaatttaatgcctgcccattagagaagtatttatcaggagaaggtggtggcatttttgcttcctagtaagtcaggacagcttgtatgtaaggaggtttrtataagtaattcagtgggaattgcagcatatcgtttaattttaagaaggcattggcatctgcttttaatggatgtataatacatccattctacatccgtagcggttggtgacttgtctgcctcctgctttgggaagactgaggcatccgtgaggcagggacaagtctttctcctctttgagaccccagtgcctgcacatcatgagccttcagtcagggtttgtcagaggaacaaaccaggggacactttgttagaaagtgcttagaggttctgcctctatttttgttggggggtgggagaggggaccttaaaatgtgtacagtgaacaaatgtcttaaagggaatcatttttgtaggaagcattttttataattttctaagtcgtgcactttctcggtccactcttgttgaagtgctgttttattactgtttctaaactaggattgacattctacagttgtgataatagcatttttgtaacttgccatccgcacagaaaatacgagaaaatctgcatgtttgattatagtattaatggacaaataagtttttgctaaatgtgagtatttctgttcctttttgtaaatatgtgacattcctgattgatttgggtttttttgttgttgttgttttgttttgttttgtttttttgagatggagtctcactcttgtcacccaggctggagtgcagtggcgccatctcggctcactgcaacctctgcctcctgrgttcacgtaatcctcctgagtagctgggattacaggygcctgccaccacgctggccaatttttgtacttttagtagagacagtgtttcgycatgttggccaggctggtttcaaactcctgacctcaggtgatccgcccacctcagcctcccaaartggtgggattacaggtgtgtgggccaccgtgcctggctgattcagcattttttatcaggcaggaccaggtggcacttccacctccagcctctggtcctaccaatggattcatggagtagcctggactgtttcatagttttctaaatgtacaaattcttataggctagacttagattcattaactcaaattcaatgcttctatcagactcagttttttgtaactaatagatttttttttccacttttgttctactccttccctaatagctttttaaaaaaatctccccagtagagaaacatttggaaaagacagaaaactaaaaaggaagaaaaaagatccctattagatacacttcttaaatacaatcacattaacattttgagctatttccttccagcctttttagggcagattttggttggtttttacatagttgagattgtactgttcatacagttttataccctttttcatttaactttataacttaaatattgctctatgttagtataagcttttcacaaacattagtatagtctcccttttataattaatgtttgtgggtatttcttggcatgcatctttaattccttatcctagcctttgggcacaattcctgtgctcaaaaatgagagtgacggctggcatggtggctcccgcctgtaatcccagtactttggraagccaaggtaagaggattgcttgagcccagaacttcaagatgagcctgggctcatagtgagaacccatctatacaaaaaatttttaaaaattagcatggcggcacacatctgtaatcctagctacttggcaggctgaggtgagaagatcattggagtttaggaattggaggctgcagtgagccatgagtatgccactgcactccagcctgggggacagagcaagaccctgcctcaaaaaaaaaaaaaaaaaaaaaatcaggccgggmatggtggctcacgcctgtaatcccagcactttgggaggtcgaggtgggcagatcacctgaggtcaggagttcgagaccagcctggccaacatggtaaaaccccatttctactaaaaaatacaagaattagctgggtgtggtggcgcatgcctgtaatcctagctactcaggaggctgaggcaggagaatcacttgaacccaggaggcgaagattgcagtgagctgatatcgcaccattgtactccagcctgtgtgacagagcaatactcttgtctcaaaaaaaaaaaaaaattcaaatcagagtgaagtgaatgagacactccagttttccttctactccgaattttagctcctcctttcaacattcaacaaatagtcttttttttttttttttttttttggggatggagtctccctctgttgcccaggctggagtgcagaggtgcgatctctgctcactacaagctctgcctcccgagttcaagtgattctcctggctcaccctcctgagtagctgggattacaggcgcctgccaccatgcctggctaattttgtgtttttagtggagacggggtttcaccatgttgtccaggatggtcttgatctcctgaccttgtgatccacccacctcagcctcccaaagysctgggattacaggtgtgagccaccgcgtccagccagctttattattttttttaagctgtctttgtgtcaaaatgatagttcatgctcctcttgttaaaacctgcaggccgagcacagtggctcatgcctgtartcccagcattttgggagaccaaggcggatggatcacctgaggtcaggagctsaagaccagcctggctaacatggtgaaacctcatctccacttaaaatacaaaaattgccggccgcggcggctcatgcctgtaatcccagcactttgggaggcctaggcgggtggatcacgaggtcaggaaatcgagaccatcctggctaacacgggtgaaaccccgtctctattaaaaaatagaaaaaattaggcgggcgtggtggtgagcgcctgtagtcccagctactcgagagcctgaggcaggagaatggcatgaacctggaaggcggagcttgcagtgagctgagatggtgccactgcactctaacctgggcgacagagtgagacaccgtctcaaaaaaaaaaacaaaaaacaaaaattatccaggtgtggcggtgggcgcctgtgaggcaggcgaatctcttgaacccgggaggcggaggttgcagtgagccragatcacaccattgcactccagcctgggaaacaagagtgaaattccatctcaaaaccaaattttcaaaaaaaaaacatgccgcttgagtactgtgtttttggtgttgtccaaggaaaattaaaacctgtagcatgaataatgtttgtttttcatttcgaatcttgtgaatgtattaaatatatcgctcttaagagacggtgaagttcctatttcaagttttttttkttttktttktttttaaagctgttttttaatacattaaatggtgctgagtaaaggaaataggcagggtgtgttgtgtggtgttttaactaggcgcttctctctcagagagttttgaaacctgtttacataaaggcccaggatgggaaggagatccaaacataagccaccagcctcattccaagtctcttctmtttccaaccctggattttttttttttatttaacattgtttcttttagctttatttttcttataaaagaaatgtatcactataaaaaattacacactacagaaaaatattaagaagaaaaacattcacatcggaaacaaagttttttcccatgaaaacagaacccaaaagggtaagtggttagtatttcaccagcaattatgttgagaataaggccaggcgaggtggctcacgcctgtaatctcagcactttgggaggccagggcaggcagatcatctgaggtcaggagtttgagaccagcctggccaacatggtgaaaccctatctctactaaaaattaaaaaattagctgggtgtggtggcatgtacctgtaatcccagctattcaggaggctgaggcaggagaattgcttgaacctgggaggcggaggttgcagtgagctgagattgcaccattgcactctagcctgggcaacgagtgaaactccgtctcaaaagaaaaaaatatatatatatagagagagagagagagagaataccacagtgagggcatgggctagaaatcagtgcactaaggatatgaaatagatgtcaatgtgaacttttcggatactttgaccctgggtctttgtatcctcttcttagcacctcagtcccacgctctgctagtcattggcttcctgataccccttcaatacagactgagtatccctaatccaaaaattccaaatccaaagcactccaaaatccaagagtcccaacgtgacgccacaagtggaaagttccacatgtgagtacttaacacaaacttgtttcacgtgcaaaactgtggaaaatattgcttacaattaccttcagcctttgtctgtaaggtgtttatgaaactggtgttatgatgtatatgttttctttttttgttcctggctcataactcccatagcccttgttacggatgtgagccaccttgcctggctaatttttaagttttttgtagagatggggtctcgctgtgttgcccaggctggttttaactcctgggctcaagcgatcctcccaccttggcctcccaaagccctgggattacaggtgagattacaaccctcatttcagagaaggtcctaccccataccctgggggaaggaatggtgacatcataaagcctcgttaaaacccatgaggacagtggagagtgtcaggatagctgaactacgtgtagaggttcctggagggtggtgcgcccagggaggggacagaagctctgcgccccttatcccataccttggtgtacgcatctcttcatctgtatccttcgtaatatcctttatgataaaccaggtaggccgggcgtggtggctcacacatataatcccagcactttgggaggctgaggtaggaggattgcttcagcctgggagttcaagataacatcatagtgagatcctgtctctcctagaaaaaaaaagaacaaccaggagtggtggcgcatgcttgcagtcccagctgttcagtttgcactccagcctgggagacagagcaagacctgctgtctcaaaaaaaaaagactggtaaacatttttcactgagttctgttagccactccagcaaattaaacccaaagcgaaggtggtgggaaccccaacttgaagctggttggtcagaagttctggagccctaaacttgctactggtgtgtgggtgggggcagtcttggggactgaggcctcaacctgcaggatctgatattatttccagaaagatggtgttggaagtgaattagaggatacctaattggtgttcactgcagaattgattgcttgctcgctctcgggaagaaatctacacatttggacacgaaagtgttctgggttggtattgtgttagtgtggaatctagaggaaaaacagtttttctgaaacagaaaggtaaatgaatttcgcctttagacttgggtcccatcctcaagatacctcatatatatgcacatattccaaaatacaaaaaaatctgaaattggaaacacctctggtcccaagcatttccaatgagggacattcaacttgttcccctttctttcggcacacctaaactgcctgccccaacaaaacattttcttgtccccaccccttaccacacatacccagtagtccattggcaggtcacagaaaattgaggtacacgtattatggtcatgagaaggattgggcagtagcactcaatgtatgagagggagaaaaacccacaaaacttatttcaaaattcaaaacatgaaaccgcaggaaaatataagtctgtttgacatacaaactaatggcagtaatctctctccctgtctgtcagaaggaaaaacacgaaagattgtttcgttccaattgggaaaagttgaatcctgggggcctggagctggccccacagatgctgataacagagctgaggttactgaaaggcttgggggaagtcctgttgaaccatttcatcttaacataagttggaggagacttaattgggcaaaggacagtttagcaatttgcttgatggggagtgacatgagttgatggatcttcccttgtaggagggtgttcattacctaggcccaacccaagaattttgagaactcttgttgtagctattccatgctcagaaacctctgataggaactgtggtaagggctcgtattagtctgttctcatgctgttatgaaggaatacccaagactgtgtaattaataaagaaaagaggtttaattgacacagttgctcacagctggggaggcctcaggaaacttaacaatcatggtggaaggcacctcttcacagggcagcaggagagagaatgaatgccagcaggggaaatggcagatgcttataaaaccattagatctcatgaaaactctgtcaccattggccagacgtggtggctcacgcctgtagtcccagcactttgggaggccgaggtgggtggatcacaaggtcaggagttcacgaccagcctggccaaggtggtgaaaccctgtctctactaaaaatacaaaaattagccaggcgtggtggcgggtgcctgtaatcccagctactcgggagactgaggcagagaattatttgaacctgggaggcggagcttgcagtgagccaaggttgtgccactgcactccagcctgggcgatagagtaagactccgtctcaaaaaaaaaaaaaaaaaagaaaactctgtcaccatcatgagaacagcctggggaaaattacctcccatgatttgattaaaccctcccatgatatatggggattacaattcaagatgagatctgggggggacacagccaaaccgtatcagggctgttccagcaggtctggattaccctggcgtggagcaactccaagcagtagggaggattttgagaaggtctagtgtgcctctggggcagctgttttccaaatactcgtttatacttggcagcctccaggatttccacccccctgatagatgcagaaagcagatccctctggaacagactccagtattggaaataaatgtacatgtatgggagattgcccaaattaagtatggcactcctaaataagccattaaaaaggatagggggccaggcgctgtggctcacacctgcaatatcagcgctttgggaggctgaggctagagaatcactggaggagagtttgagaccagccttggcaacatagtgagacctccgtctctaccaaaaaaaaaaaaaaaaaaaaggtaaaaagaataggataggatagaggtttactcatctttctgagagagaaagagtagccacttttttttttttttaatttttttcttgagagagaatctcattgtgttgctgaggctggagtgcagtggcgttagctcactgcaacctccacctcctgggttcaagcaattctcctgcctcagcctcctgagtagctgggattacaggtgcacgccaccatgcctgtctaatttttaatatttttcgtagagacagggtttcaccatgttggccggctggtctcgaactcctgacttcaagtgatctgctcgccttggcctcacaaagtgctgggattacaggcatgagccaccacacctggctgaaatttttattttttaaattataatagagacagggtcttgtcatgttgcccaggctgctcttgaacacctgggctcaggcagtcctcccgccttggcctcccaaagtgctgagattatagataggcatgcaccaccacacctggccytatgtttgtttttcttaaaattttttttgtttgtttctgtttttttgtttgtgcttttttttgccttttttctttttttttttctttctttctttctttttttttttttttttgagacagcgtctcactttgtcacccaggctggagtgcagtggcgctatctgggctcactgcaagccccacctcctggattcacgccattctcctgcttcagcctcccgagtagctgggactacaggcgcccgccaccacgcccggctaatttttttgtattttttagtagagacggggtttcatcgtgttagccaggatggtctcgatctcctgacctcgtgatccgcccgcctckgcctcccaaagtgctgggattacaggcgtgagccaccgcgcccggcctccttttctttttttttgagacagagtgttgctcttgtcgcccaagctggagtacaatggcaggatcttggctcactgcaacctccgcctctgggttcaagtgattctcctacctcagcctcccgagtagctgggattacaggcatgcgccaccacgcccagctaattttgtatttttagtagagataggatttctccatgttggtcaggctggtcttgaactcctgatctcaggtgattcgcctgcctcggcctcccaaaatgctgggattacaggtgtgagccactacacgcagccattttttaacagagatggggtctcactatgttgtccaggctgggctcctgggctcaggcagtcctctctccttggccttccaaagtgtttggattacaggaatgagccatggcacccagcccatcacaattttagatgttcatctttgctccagaaaatctagttttaggaatttaccttaagaaagaaaaaacaagtgtgaatagatgtatgtatatgaagtttgctgcagtattatttagaatagcataatactggaaataaaagtatactgataggagtttgggcacatatagtatggtgttcctaaataagccattaaaagggaaatagtactatgctcatataatgacaggaaaagctattaattgaaaaaaaaacagaaaattaaatgttaaaaaaatttttttttcaccatagtgtctgcaaaaaagaaaatatgtttaaaaaattggccagtcacggtggttcacgcctgtaatctcagcacttcggaagtccgaggtgggcagatcacgaggtcaagagatcaagaccatcctggccaacgtggtgaaaccccgtctctactaaaaatacaaaaaactagccaggtgtggtggcatgcgcctgtagtcccagctacctgggaggctaaggcaggagaatcacttgaacccggtaggcggaggttgcagtgagccgagatttcgccactgcactccagcctggtgacagagtgagactccttctcaaaaaaaaaaaaaaaatcattttgtataggactaaaaacatgtaaaaggagtatatactccaaacaataatggtgattcctcagggatgaggttatgggaaggtgtttgttttctctttctttctgtctttgacaaatatcacatgctatcagagaaaccaataaagatatttttgttaaaaaaaaatatagccgggcgcggtggctcatgcctgtaatcccagcactttgggaggccgaggtgggtggatcacctgaggtcaggagtttgagaccagcctgaccaacatggagaaacctcgtatctactcaaaatacaaaattagctgggtgtggtggcacatgcctgtaaccccagctactcaggaggctgaggcaggagaattgcttgaacccaggaggcaggggttgcggttagccaagatcacaccagtgcactccagcctgggcaacaagagcaaaactccgtctcaaaaagagagaaaaaaaaagaaaaatatatgcaaagtgcatagagaagctttattattctcctttcatcagtcttccctcctgctccagctttttttttttttttttttttttttttgatatggagtctcactgtgtcccccagtctggagtgcagtggtatgatcttggctcagtgcagtctccacctcccgggttcaaa

SEQ ID NO: 94424 - DNA, 409061 bp, Homo sapiens
  misc_feature (1)...(409061): n = A,T,C or G
aatataaggcttttgaagttcattcacgatgttgcatgtatggatataccacagtttggctaatcattctcctgtagatggacagtttgtgtccagtttgcaactattacaaacagagctgtcattgccattgtgtacaatttttctttggcatatattgtcatttctctttggtaaaaacctttgagtagaattactgggtcacattgtaaaattatgtttaactttatataaaaactaacaattatccaaatttttagttttatatttattttatattttataaaatgaatgaaatcattttatattcccaccaatgatgtatgagctccagttgttcaacattctcccttaaacttagtattgtcaaccttttcaattctagccatttgaataagcgtgtcatagtatctcattatgattttagtttgcatttctctgacaactaatgataagcgtcttttcacgtactttttactgccattcgtatagcttcttttctgaagtacctgttcaaatcctttgctcattttaaatgaatcatttgctttattacatacacacatacacgtgtggtacttaagatgctgaactcaaaggattgattttaatggtaggcatcagacacagtagtcaagggtgaagtctaattttgtatatgaaaggtggaatttttacccctatgtaagctgcaaagcactggaacccactattaatattgcccctgctctgatataacagaatgattgggcacacagattatggagtcactctgtcttggctcacacactggctccaccacttcccagatgtgtgttattggacaaagtgcccaattaatctgtgcctcagtttcttcttctttaaaatggggcaatgataatacctcaaaaattgttgtgatatctaagtgataatactcacctcaaaaatttaacatcctttgaacagttcaaatacatagtgagcactcagtaaatatttgaagttatcaggacaaagaatctgagttttgtttattaaagtgttcacctaaccacattctttctagaatccttatcaataccacattatctctctcctccagttctcaattatatttctaccactaatttctagatcagcaatatctggagacttatgtttcgcttgctcccaggtgatttgcaaaaacaatggcaaagacagaggtggtggctgggtgcagcagctcacgcctgtaatcccagcactatgggaggccgaggcgggtggctcacggggtcaggagtgagaccagcctggctaacacgatgaaaccctgtctctgctaaaaatacaaaaaatagctgggcatggtggtgggtgcctgtaatcccagctactcaggaggctgaggcaggagaagcgtttgaacccaggaagtggaggttgcagtgagcagagattgcaccactgcactccagcgtgggtggcaggacaagactccatctcaaaaaaaaaaaaaaaaaagaaagaaagaaaaagaaaaagaaagatgtggtgtgaaggtagattttacctgattgcttaaattttatatcaatttatatcagctttttccttggaaatctaattctttttagactatagccacaaagtcttgagataagttaaagctcaagagagggagagcaactagactcattccagcaggagactgggagtaacatatgacaatccaattattttatttcagagaagaaaattagtttcctctaggacaaacagaggaagtgaaactttaacaacttttggctttgaacttcaggaagccctaaaagttcctgaaagtacgtattaaaaaaaaaaagaaagaattaagatgtattagattaatataataaagaacaaaaaccacatgatcatttcaatgcatgcagaaaaagcatttgaaaaaattcaacacccattcataataaaaactctcaaactaacaatagaacttcctcaacctgataaagagcatctataaaaagccacagctaacatcattcttaatgctgaaaggctggatcctttctttctaagatcaggaacaaggcaaagatatctgctttcaccacttttattctatcttgtgctgaaatttgtatagctaatgctataaaaattttgtttttaaattaaggacattagattggaaagaaagaagtaaaactgcttctttatataatgttgtcctatatgaaaattcaaaggaattttactaaaactattaataaaagactttagcacttgtataagatcaatagacaaaaattaattgtatttctatgtaataataaacaatcagaaatggaaattaagaaaacatttccttcacaatgacggtgaagagaatgaaatacagaagaaatacaagagtttacaactgacaactataaaacatcattgaaaaaaattgaagaagacctaaatggaaagacatttcatattcatggattgaaagactcaatattgtcaagatagctattcttttcacattgatctataaattcaatgcaatcaatctctagcaaaattccaccagaaagactggaaaagtgagtatctctgttagtttgccccctaactattttggagcccaggggcaacggtacaaatagaaatcccagccacaaactactctcttctcttcctacccccaaccctgtcttacaccagtagcctcatgtgctagtgtgtgtgtgtgtgcgtgtgtgtgtgtgtacatcctggcccataggtacaagttccaacccttcctaccctatccccatcacaaacagcttcctcttggccaccccttcaacacagagctgtgcgcaccagtaaaactgtctcctttcaggagaacagacccagagaagttcaagcagttactaggaaaatctctctcagagccatctggaaaattccatagtcctgtttacctgaagcatgctctagaagcactggcttgggctccagatgggcacatctgctaggccccccactcctcagaggagagccaaaagcaacgtttctcaaactttaataagcaagtgaatcactggggatcttgttaaaatgtaggtttgtaggtctgaggtaaggcctgagagtctgcatttctaacatgcttccagctagtaatctgttactggtgtgtgtctagtccgcagcaaagatgtaaagcacgagtcctagattaggggccttactaagctggctctaagggcagaactcagctgtagaatggaagtgatatctatgggagtggaaggtggccctaggactgccaggagatcaccatctatgacggagcacattggtaatggctaatggagggccagcaaacagtgcttgcagtgctggcacttgaagagctataggctaatgggcaagttagacattaataagtaattgcaagacattgtgtaataggcaataatagaggtatatatgaagcacataggtgacagcagacatggggattaactctttgttggaaaaatgtttcacaaagaacgtcatatctgagcagagtgctgagggataaactgagtttcctagagaacaaagacagaaaggggattcaaagccgagggaataacttatctgtggcagggtatattttccaaaaatggctgcaacaatatctctactcccacaaaaccttctagaaactttccacttccctattaagaagtgaattccaattcccttttccttgttaggatacttccatgagtacaacgtggagaagtgacaccatgtgacttacatggctagatgagaaaaggctatcttctgtctggttttcttgggatgcttgtttttggaacccaaccactatgctgkgtggaagccaagcagcccatggaaagtcctggtggggaggaattgaggacctcacccacaattcctattgagatcctagctgacagccaacaccaacttgccagccatgtgaatgaaccatcttgaaaaaaggtcttccagcctctgccacactgttccaggtgacactatatggagcagagataagccacttccactaagccctgaccaaattgtggattcatgggcaaaatcaatgattgttgtttaaaccatcaacttttggagtggtttgttatgcagaagagattcccacaacaatatccaaaggcaaaaaggtgtaaagcagcctggtgtttaaaaatatgacacaaacaagggcatgtttatgtataactcagcaagtagaaaaaaaaacataataagatgggacctgttgagaatgtttaacattattaaatgttagattgcttgagcccaggaggttgaggctgcagtgagccatgttcaccccactccactgcagtctgggcaaaagacttagatcttgtctcatgaaaaaaaaaaagactaataatctgctgttgtgtgtatgctgtagataaagccctggtagacaatttccaaaagaaatcaatttattgtttttactaccaaagtggaaacatgatataatttcagaaacaaataaaaaacccacctgaatgtggagtggagggaaaaagtttagtaaacaaaccattagtagtgaaaatgtaatgaagttgtactatatattcaaccatgcttggattaattatttttcatggctctgacagtttctagatacaatgttaaggcatttatataacaacgttttcttgctgtaaaaaactaaattcttattgaaaagaaaatactggccaagcatggtggttcatgcctataatcccaatccctcccatgtctgttttgggatgctaaggccagagaaaagcttgagcccaggaattcaaccagtctgggagacatagcaagatcctgtctctacaaaaaatttcaaaattagccaggtgtgatagcacacacctgtggtcccagctacttgggaggctgaggcaggaggattgcttgagcccaggaggttgaggctgcagtgagccatgttcaccccactccactgcagtctgggcaaaagacttagatcttgtctcattaaaaaaaaaaaagactaataatctgctgttgtgtgtatgctgtagataaagccctggtagacaatttccaaaagaaatcaatttattgtttttactaccaaagtggaaacatgatataatttcagaaacaaataaaaamcccacctgaattctgtgggagataagttcccacattctcgggacatcaaagaacataattctgacctatcatcaatacctttgtttttctccctaaacacacatttctaaaagaaccaaccaggagtttgtgaaagataataaaatttatgactattctttaaagttgacaatgttatttcctacaagccttaggagcggtgggtgcatgctaatttgatagataaggatttagaatgcagtgaattgataagtcaagattgtttcctgaacttgtgggtctcttgtatttctttttattctttgacactaacctaatgtgtcattgaaaagcagtatccccatgcagcatgggaatttatattacatttagcagctggaatggaagattcctgggatggggatagctagtgacaagtagcttccttctgctctcagctgatctgactcctcctggaatactgtgttcagttcctgacaccatattttaggagaaacatagacaaattagagtacatttggaagagagtgccttaaatggcgaggaaacacaaacccatgtcacatgagggacaaatgaagaaaaaggagatattaattcagggaggaaccaactaatgaagcatattcaacatttttaaataataaaagctttcctgaagaagggctgttggcattgttctgtaacctcaaaagcatatgaagggaaggattgggaggcaattttggggtgaagaaagtcaaagctacccaaagatggaaccggctattaggagaggtagatagtccctgtcactggaggtattgaagtaattttttaaagaaggaattctaaatttgatgatggttggatttgacatcctgcaaggttctttccactactgtcagagctttgacgtccttcagagaactccgtatcatcacccctgggagtcaccaggtatactctcatatgagcttataaaacagcccctttccttttttccacttcttgctcccagaagtggcagcattttctgaagcctccaaagcctatgaaatccccagaagtaatctgttctctaccactggctaaaaggggcctatctcacctccgactgatcggccccaaatagttctgcaccaatgcctccaagctgcaccaccagccaagccactgatagtgctggggctaattcccactctctgtcagttccctcaacatggcaatgcctggcttcttcccttttctgtgttacactgtgcaattgtcaaacagattttgtgggtatatggctgttagtccttagtcatagaccttcttccccttggaccataaaagtctacaggggttgaattggaataatcggaaagcaacagattttatgacatgcctaaaattgcctttatccagtgatayactcctcatccttaagcaatcttctatgcctccaacctctttttccttaggatccttcttctcaggacaatgcttggctcctcatttaaatatgacactccaccctaagagcttgctctaccaccctcagtacatacctgacattctgaatcctagattgagacaaattagactcaagctgtagcctttcctttttctttttcccctacctgccctccctgcaacatgattctgtgactgagggttaagagcagagaaagaggaaaataaaaataacagattaaaaaatggtttatggaggccaggtgcagtggctcatgcctgtaatcccagaactttgggaggccaaggtgggcaraacacttgaggtcaggagtttgagaccagcctggccaaatacagggaaacccygtctttacyaaaaaatacaaaaattacctgggagtggtggtgcacacctgtagtcccagcaggctgaggcaggagaatcacttgaactcaggaggtggaggttgcaatgagtcaacatcgcaccactgcccaccaacctgggtgacagactgagaccctgtctcaaaaaagaaggttcacagaaggggaagggaaaagacttagatgatgtggatggcttaattaaaaattttgagtggmgtttaataataattcagtatgatgtttatactctaaatagcataactgaaagaaatgctcttggaacttagcagtgacaatgtaattggtcatttgtcataagtttctgctgatgaaaatctcattcataaatcaggaacaacatattcaatagcttgctgacagtatttggaaaacaatgtttcatactcattcaatgctaattataaactttgagagtcaaattaagaatatattgtatatacactgaataaagatatttacacatacacaatgtgggtcaagtgatactctccaacttctgaggtaaaagtagcttgttaccagtgtccctggcaaagttatgctgaggattgatggaagggatggtatatgtttttcctccactctgaacaagaagagagatcaaggggaattagctctttcatctgaactttccgtagaggtgcacaactcctcagggatgtagttttggaacgggctggggaaaagaggtcaacagtttgacttcttatgtattcttcacagcatattgcagtgggcctctttctcttgcctgtacaacagagagaaatgacaggaattaataagaaagctaatactctactcactctaagcctctgaagaagaattcaggtatttattttggctctctgaggccagtctaatgaaagttgagcctggtacaggattgaacatatcaactattaagcaaatggaagaattagaggcaggatattagctatagtcagaagctcaaagctcagaagctaggttaaagcagagatggtgagcaatggcatgagtgaaactcatcccggttagcaagtccaagatagrtagaagtagagtgtgaaactatgtttgtgaacgtgcagttctgatgacaaaggtgcaagaggaatggaaatgcatggcttggatcacactttaagaaaaagatttgcctatccactgtgaggagtccaagttagctgctgccaactggcagctctcagtgccctcaggacccattttagcttttgaaccaaggacatgctctccctaggcatcccagcaaatgacagaacatgatgggaacagtagaaactggcaatttctgcccagtgcttacaggcaatctttgcactggaactttgttaggctggacgagacttcctcagcactgcacttcagcatgaggctcctcctacaaacttcttcctcctttctctcttttcacaggtatcagaccagtatcatagcctgaaggatttccctgcctactcctgctccctttcccctttatcattcgtatataaatacatacatttcttgcacatctaactgcatcttggtgcctacctcctggaggactcagccaatacaagggggaatgctgatgtttgggtttggatcataatccagaaagacacaatcccaaatgccataatcccaaatgttgaagccgtcaaagatcaacctccttagacacgagatgggaaaatgtagtaagaagtgctcgtgttggtgtatatcaaataacagaagaatttcaaaaagagcagggccacatagaaaatgattgtgaatgtatttttggaggagagctatgtcaaaaaaaaaaaagcagctattcattgtgatgcaagacttcaaactacagttaatgattgtgaaagtcagccaggtcttctgggactatatctgtgcaattacctataatctatccctgtaatatattgtttcatatgttgaattttctttgacttcctgggctcaagcaatcctcccacatcagccccctgagtagctggtatgggtgagccactgcttctttcttctttttttaagttttttcccccactattttaaattgtcaatttttttttttaacaatttgctatgctatgtatttcgtcttggcatcatttccaatagcggaggtataaattgtgtagagacttttaaagagttctaatttgttttatgcattttttgcaaatttgactccatgagagtgaattaccacaaaaatgatttgtatgtaagcattgttcatgtatgtaaaaacattgaaacttccttaataaatggagagatgccttttttcgtacatttgatttgcaaaaagtaaaattgcccaagatctcagctcttcgggcaactgcatatgtggtggtgacccactgaggtttttgattgatttcttcaaaagatttaggtatttctcacggtatttcagtatgaccacaataataaagctgggtgcactcacttaccaaccataatgatatgtttacacattcccttctttgacctatttatttatgaatatggcttgtctgcttataactgtgatactcatgtgactgtcattagtatacctgagtgttgcaaaaatatgtattactgcctattttattgtgtaaactggcctatgaagtactttgttgtatttttatgtttctcaaataaatccccttttaaaatgtaaataaatgttttatttttttcagaattatattcttgagattttgatctttctggattgtgattttcaggattttggactttagagattttggtcttttaggatgttggggattatggcatttggaattgtgtcttttgagattataatcaactcccccagaatctgaggatacagcctgactagaactaggctagtaagataaatcatcaactgggggccttgatacttggcttctctgatggtgctggtttttcatttgaccctggtttgcatattaaacccagagactttaaacaaatggcttacctacagagtcctcatagtaagtcctggtcaaaagaaaaacagaatagaaagcaaaagagaaaagagtctttattcttctccatataagttatgccttcctcttaatatgtaggtgtactaaaaatcattgaattatatactttaaattggtgaactgtatggtgaattatatctcaataaagctgttatttaaaaagtgtgcacttcctagtatagaaggtagtactaagatgcatgtgaaagaaaataaaagcaataagataacgacagccaaaaaaaaaaaaagtttttttcagaccgggtgtggtagctcacacctgtaatcccrgcactttgggaggctgaggtgggaggattatttgaggtcaggagtttgaactagtgaaacctaatatggtgaaactccgtctctgctaaaaatgcaaaagttagttcggcatggtggtgggcacctgtagtcccagctactcaggaagctgaggcaggaaaatcacttgaacccgggaggcggaggttgcagtgagctgggattgcaccactggacttcagcctgggcaacagagcaagaagagtccgtctaaaaaatgaaaaagaaaaatgttttctcatttggtcatatttaaaaagattccacattttttctttatagaggctgcagagaaagccagagcgttcatgaaatactggaaaatattcattagtatactttctgaattcataaaaaatagtaaagagcttgtgtattctttgaaatggttgttgatatgaatgatgtgaaacagttacacccatctccacaattctatagtctggggaaatggcagctgaaaaagcaggtatatttattaattcaaccaaccctcagggatgctttttctttttactaatgtgtaggtgtggagataaataaagcatggtgtatgcccttcagaagttcacagcaaagtaaagagtgtaggcttttaaacagtgtaaggtacagggagacatgcggtgtggctgacctagaagactatttgcaagagaaagtggcaaactcaagtgagagaattacacctagacttgagggtgagatgatctcccacttatcaaagcaccaggaagactagtagctcacacttctattgtacttactttgcttcaagtctattcaagtcgcagacatacattaactcatttaatcttccctctgaccctatataagaattggccattcaaataagccccatttgtaggggagaactctgaggcagtaagaagttaaaccacttgctcatggtcacataagcagcagcagaaccaggatctagaaacaagatagctcagttccaaagcatctctgcaatgcccaggaaaggcgccaaccagggcaaggcttttccgtctgyttctttctgaggtttctccatatttttatttattgtactaatagcattataataactacaacaaagaaaacctcaactacaatctcattgctcaacaaatctccgattctttcctttctgtttggttagtcctctccayagccagttcttcstttcttactcctgtggtatctaaagacagcccctcagaaccacttttcttttttttcctggcctgtgctgtctcttgagatcctttacttatgtctcagtacctccttaagcctctatgtttgcagttactgagaagttaggtgcaatagtccatttcaggagttagtgggactcctctccctggaagacctaccatgacagcaacctccttgatacatggagaacttgagggggaacttcatcattagtgagcagagagcatggtgtagtaatcatctattgatgcataacaaattacccttaaaacttagtggctgaaaataacaaacattatctscagattccagagtggcttagctgggtgtttctggctcaaggactttcaagagtttgcagttaagatgttgatcagggcttcattatctgaaggcttagctaaggctgaaggatctgctttaaagcttacacatgtggatgttagcgggtcttattttttagtcacatgggcctctccacagggctgctcacaatatggcagctagctttccccagagtcagtgacagcaaagagagagagagagcatcagtgtgtgcgcaaccaagatggaagccctaaactaatcttggaagtgacataccctcctttctcacagcattacaccaaccctagcatgacgtaggaggggattacacaagggtgtgaataccaagaggcagggatcagtgggacatcttagagactgattaccatactcaggcaacgtctaggggtgagaggagcagccacacttctatgtttgcatcttaatttacatgaatggcaccccctgatactttgcagtgtacaaaatacacgatcatacatagtggtccaggtagcagttcctgaacaaatggggaagtcaggggaatttgtcctcagtacacttctattccctgctagaatttcatttatttatttatgaaacaaacatttttttaaagcacctggtcgtacctttgcgttggtactgaactaggtaggtaatggggttgcagttctattggagtttcaattttcctacaccactgttgcccttaagtatccaaaacattcggggtgactacagcctccttcaagccagasagtatgcaacagatcattgwtttctatcccattctttggaaaacctgagctaatatgatgtttctttcaaagggtataatataaatatgtaataacccctgataattgggtgcctaacaagaacagaagttgcctaaataagtagcagggctctaccagtataatgcttctgctcaaattcagcccagttcccctgagagaggtcttttctatcacccatccagtcaaactggaaaactaactgtggctctrcttactcacgaagttggcagtaacaacgttttaagaaggacccttcaaaaaacattccaatttgccagttgcagggggaaaaaacgtaggctctaaattaatgatcagaaataagaaatgtaagaaaggagtgagttcatgacgacagactgatggaccagagcagaaaatataaggaagatgagctatttgtcttggagaccaagtttgcaccgcagaagagagaaatagagaaaatcaaataaatatttatgtctgtaacaccagactcatggtaaagtgtccttaagttcacagactccagagccaaactgctgatttcgagtcccagctctgctcctcactagctatgtgactgtaggtgagtgacttaatccctccgtacctcagtattctcatctgtacagtggggctgattggataaaaccaacctgtgtggtggttgtgacctagtataactaaagtgcttagcatgctgcctagcacaaattaagaacacggtaagtactaattattgaagaaattagaaacaatacctattgtgtcatcaactgaaagagaccaatttctttcactcggtcattatctattgaatatatacagcactgaaccccagacgacgaaatcctttttctcaaggtgcttttacgtgggagggctgggagagggaggaaaaagaaagcagaagggggaaactaataaataagtaaaaaaatgtattatgtcaggtggtgatcatggagaaaaagcagaggatgtggataggaagttctgggggaggagtgggaggaaagaatgttctagagataggaaatagtaagtacacaggtcttgaggctgaggaatgcttggtgtgtccataactgcaaggccggtgtggctggaaggagacgaggatggagtgaaatcgtacagcttgaggtcaggggaatcctggctgggaatggtgggcacatcatgcaggccatgtatccatattttgcactttggctgttgctctatgatgggaagccactggaatttttgagaagaagagagacataatctaatctttgttttaaaggacagtcggctgtgtgtaggtgttggggagggaggaggcggagagtgggaggtagaaagatcaggtaggagataattattgagagatgatgccttagaccaggacattagcagtggggaggggagtgagacggagtggacattttcaccatatatttgtgaaaacagagtcaacagaatttgctgacgaatgtgatgctgagtgtacaacagagaaggttcagacatagggaagttctgaggacaaggatttttttcttttattcaatgtcatatatctaccacctagacagtgcctggtatcaataaatattccttgaataaatgaaaagggtaactgatttgtattaaacccattttgaacttagtaaatagcagttaaaacatctacagtcaaatgaagtactgtagcaaccataatttcagcaattaagcagtgaaagatcttccaatcctttcctccacaaagatagaagttaattttgctgcatccctggacaccccgttgccaacgacccagcattccgttggtaagtgaggctggaggttggagtgggagaaatttcgtggaagctaagttcgcaaagcaggtacgttttttttttttttttaaacggttatttgggatgaggagtacaacggaacctaatgttccctcatgccacctacagcactgctactgttcccatatccttcaactgggcatgaaggcagcttcccactcactctgacagtggtgcaccctgtacccccacccctctcttcaataccccagggctaaacggcccgaagctcctctctaccggctggtgcgcattctgggccagggcgagccaaaaggcagaagggccttcgtgctgcagtgtctggtgaagactcaggcttagctggaaagaagtttccaggccaacgtgaagttttcctgtcttgggtacatgcgagccccacgcgtctgcgagtttgggttagtgtgtcaacagggtcagtccccgtatctactttgcgaaagcttcgaggcgagcgtgaagtcaagggctgcggtggatgggggtaaaagccctcctcgtcccactgcctgcaccgtcttggggtaacccctaacccccagccggcgtttccctttaatgcgcgtgcccggcaaagtcctcgcgtcccctcccctcaagccaccccgtcagcctcggtttcccccacttctccccgtccttgtcgttccttcgccgtgggacgcccctcgctcacccccgtcagagcccagtctgcgcgcgggacccagctgtcactttacttttcctcgccgcctccccaccccctctcccgaatccgcggggcagcccgcccgagcgcgtcccgcccccgccccctcgcggccgcgcgccggaggaggaggggcggggggaggagggacgcgcggcgccgcatggccgacgtggggctcgctctcgcggtctctcccgggcgggcgcgcaggcacgcatctgcgggtgcgcgcgcggacggccgggcggcggcggctcccggaggtggtggcttcactttccaggactcaggggcagccacagcgacaccgcggcagcagcctcaggagccggagctggaacggccgggggcggcggcagcggcggcgctgagggtgagtccgggcgggccgagcgcggcggggacaggcgtggtcgggtgcgtggnnnnnnnnnnnnnnnnnnnnnnnnnnnnnnnnnnnnnnnnnnnnnnnnnnnnnnnnnnnnnnnnnnnnnnnnnnnnnnnnnnnnnnnnnnnnnnnnnnnnnnnnnnnnnnnnnnnnnnnnnnnnnnnnnnnnnnnnnnnnnnnnnnnnnnnnnnnnnnnnnnnnnnnnnnnnnnnnnnnnnnnnnnnnnnnnnnnnnnnnnnnnnnnnnnnnnnnnnnnnnnnnnnnnnnnnnnnnnnnnnnnnnnnnnnnnnnnnnnnnnnnnnnnnnnnnnnnnnnnnnnnnnnnnnnnnnnnnnnnnnnnnnnnnnnnnnnnnnnnnnnnnnnnnnnnnncagtctccctccccctcgcgcctgggcagctctctcccagggcttcggctcgagcctgcgacctgcacggacccccccccctcaggtattcgctcgggccgcgcgagtgcctcccctcctcgggcgtcctccctctcgctgacgtcctcctcactcccccgacctcccctccgcgtcgcaggtctctgcttacaccgctcgtgccctagttccctccttcctcgctccccgtgcccggttccctaagcaccctcccgcgagcctccagcccccgtttctcgccctttctatgcctcccccttcttcttatcccccccttctgcctcttctctccctgtcctccttctacccccttccgttctcagttccccatccttctcaaccctcccagcgctttccttctcctagccgcatcctggaactaagtcttttcaaaagtacaggataaatgtcacggtggaaagtgccaggattgatcttttgctattttccctaattgcataattgctgcacatggtgtgtctcctggcgagtgccgggtttggctccttcgccgccgcaccccggtggcccgcccggagaagaccttgtggggtatatttgtgtgtgtcctggtgaggggtgtgtgttgtattggtcttttgtgatgcctggcgcttgtcacagtttggaaccgaagcccatttttctctggtctcttctctgcagcccccactggcctggtttgaaactggattccctctgtcctctcccccttcccgcccaccccacttctccccctcttttctccgatctctctcataatgttttgatctttttgccctttaccatttctaatgaagataaagcgtggcttcttgtggcttttttcccccacgaccaaccagaaatgtccaatccatcttcccttaaggaaattaaggctgctttagaaagacatcatcctgtgctcggtggctgttagacccatttgcatgttttcaagattcatcgttttgtattgtgtattcttgagagtctactaaaatatttttatttaaaagtacgaaaggaagtgctagggtttycctcaaagtatctcgcggttctaaaggattttacgctcttcttagtttttaatccctgatttctttaaaaagtatgtttctagatatgtgataattcagtctggactttgtgaatctaaatatttgcctttactwcggcaatttggatgctccttggctctttggaattctgtatgtgggctgacgctgaaatagagtgttttcatataatgccataccccattctctttcccctgcagcaccttttacccccaaatcaggtgttccactgttattttctgcataaatgtctttgcagttaaatttaaagctggatattgctgtgtgcatatactatatatttattttacattttagaaaagtttagaaacatgagtaggaagacagcaagacatatatgacagaattaaacgctttcctgttataaaagcttaaatgaacacttggttttgcagttttatactagtagatactgttataaggcttacctgggtagtaggctggatttatggaatgactatagttgcctttatgtagtcagtaatatttcaagccaaatcatttcatttttatggaacatgtgagtttcattcactgtatgttgctaatttccaggactgtaattacaacatagggtacatagctaatacaagcttagacagtttgtgttgaagaagtaacaatatgtaagcctcttaatatagttttaggaaggactacttattttatggttaaaaattaaattttactttgagttatgaagtaagcgtatttatctctctcaatatctttgaaagtatcattggagagtagctgtttgtttataaccctgggatttaagtttatcttccctgtagatgagataatcggatcagattagctatttaggaattaattttaaaatgctaatttagaagataatgtttaaaggattttaattcaggaatttttattcatttgtacttcagagagacaagacatcaagtttacacttacgactaattaaattgattcatagactactttttcttcataaaaattcgttgcacctgagtggtacaataatttttttctatactttttctgtaatcaagcattcaaaaaacaaacccaggagaaattccttttattattgatatttgaaaaagagatgtgaaaactttatttctaaaagttcctatagtggttatcaatggcctcagatggacttatcatttgtaggttaacatttggrtgaaatatgtcttaactcaaaagtgggaataattcttttccttaatgtgaaaccagaaattacacctctgttggggaatttctaatagtatttttattagttctctggtgagactaatttttattttaatcttcctctaatattcggcagtagaaatttgagtttcagattatggctcagatcacatcattgagtaatctttttaagtaattatataactatggcattcgatagtatgtaaatgcmcataaataagaatattgagaagaatgtgtggctttataactaatgttatacacaactgaaactctcagcatagtttattaaatcatagtttattaagctgaagctgcatcctcagtatagagaatattatttcattgaggtacccatatatttgtcatggaatggattgctcctgttttaaaatgtataaaatgatttctcactcatttcacatttcttaaggtattgctggcagcattttgctatatctgagcacctttccctgaggattgttctctttttcactctcatgcatgccgccctatctgatatgccattatgtacatacttacaagattttaaacttctgatatattttaactgaaagaaggtgaaaaaaaatattaaatccaagaatgagaatttagagtgaaataaaaatgaaaaaaascaagaaatatgttacgacttttagagctagatgtgaaacatactgatataaaatttcagtgttctattaagtgactttagtgctcataaaagatgtcacagctgtggagactggtgctcttcatttacagaataggtagaaaagtagtcagcttttccgttagtatgtttcagagctgttggggcagatctgtttctgtttggcatggggagctgttggggttgaaggggtgctggtggtggtgtgtgtggtgtgtcagtgaaaggattcactattttctgttgactctttgtggctctgtgcttcctgatgcttccattcttttgcagtgctttttggtttgtcttacaaaaatttcagtccattaaagatcggtgttacaacattgctttggcttagagcaagctacaagttaaatctttagtgatgatgaattttcatcagtgtcaaatagctatccatttggactaagttatagtaattaaaaaattttgctttatttgaggtatctttacctgttcttattcttgatcatatcagaaacagttttatttcaagttgtaatttgattaagagtaatcaaaaggatccatttcaaaaggaatttgttcagtgtacctataatttttaaagatatrttttttgctgttaatggtacttattaagtataggtattttgtttttaaaaaggtgtctgagaagatagctatacagtgctgaaagtgattattaggtgacaaaaccatggggagcacaaggccttttagagtctgggcatgagttttgttggttcagttctggatttgtcagaacactttaagctagtcagctcataagggatgtattcatagtcatcaaactcagaaattgattatgatagaatgacagttgaggagagatactccttttcacttactggaattgtttgtgtctgctgtctagattataacagctacctaaatatcaaggtattgaggaaattgagttggtaatcagaactgcttggggggcctgaactcagagcaaagggaatttgaaagccttgagggatattttagccagaatgtggggaaaaaaaaaaaaatcttcagtgtcttcatctcttgtgaaatatggttgctttagtatatagctgaatgctgtcatatggttcaatttttatttagaatcatgcagtcatgcaggcctctgtgttcttctgttatcacaaaggttacttacaaccacttactagtttggagaattttaaccttagcccagccctgaggatgtattgattgaatagggatttgaaagtgtcgtcccatttttgtgttcccacaagtatttgtactaaccttcgtttttgtacttagcaagttggctagtcgaggtttttcacagttgtgggaccaaagggcttagcacagcgcctggtagagagtagacccttaatcatttttktcttattttctgtaacagcattattgatatataattcacatactataaaatttaccctttaaaaatgtacaactctgtagttcttagaatatttattattagaattgtgcaagattataattatctaatttaagaacatttttatcaccgcacagggaagcatcatacccattagccgtcactcttcactactctcccctcactccctggcaaccacttacmcattttatttttttattaattttttttttgagacagggtcttgctmtgtcactcaggctggaatgcagtggtatcaatcatatttttattttttgtagagatcgagtcccactacgttgcccaggctggtgctccctgagcttcccaaaacattggggattacaggcgtgaggttcactactgaattttatgtttatggatttgcctgttcaggacatttcatataaatagtcaaacagtttgtggtcctttgtggctggcttctttcacttaccagaatgtttcaaggttcatccattttgtagcatgtagacacagtacttcattcttttttatggctaacagtacattatgtgaatatactactatattttgttcatccattcatttgttagtggatatttgagttgtttccagttttgattattatgaataatgttgctatgaacatttcatgtataaattttgtatgttttcattttagaatacattttgaatggatgaaggaaaagttttagcaactcccaaagctgcattgttttktaaatgaccaatttaatccattttatattgagatttacttgttttactttgaggctcattctctgtgttctggaggtagcttactgtagtacrgctaaataaatgatttttgattctttaatccaggatctaaaatgtccactgaggcacaaagagttgatgacagtccaagcactagtggaggaagttccgatggagatcaacgtgaaagtgttcagcaagaaccagaaagagaacaagttcagcccaagaaaaaggagggaaaaatatccagcaaaaccgctgctaaattgtcaactagtgctaaaaggtacttcagttattataacctttttattgttggtatcaatttatcatcttaagttctatttttctcttgcatttaatcattttttctgggatgtcggccgtgaacttcatggatttttcttttcccttcaagatgatctcgtttacatggttttaaccatagggaacttcagtatttaaagtcagttaaatggcaaggcaaattcataacatacatttccatagtgtgtttgtgtgtttatgtattatcagggaaacatatacagggtgtgtatgtaaaattgcagtagtttcatttatggttacttgaccataaatattttttttctgttcagtaacacagaatagagattaggaatctttgaagtagttactgagtgagtgacagtttattttccactactcccagttggtaaagtcagaaatgctgacattagcaacaggtgcatcttggtttcattacattagtcagtggatccatcttgatacrgattttctctttctctagagaatagatggatctggaaagtaggtatttgaatgattttctgttggtactcaatctcttaaaatgattggcatgtcactggacttaaagggaatctgtttgatattgttacattatagaatatctcttggaaaataatttgaaagataaattaaatgtagtgtctttcctgatcctgtgattttatgttcttgctttgttttcatatattttacattgaccaagtcggaagtatacataaaagcgatctgtaacttgtaggcatagtggaatgcctgaatgttgtattacagctttatatgttattttatggtgtgggttaaggggaactcctttctcaaagataaaaaaccattattttgttctagtagaccttgttttcctttggcttagtcagtctacagggttggaaagaaccttctcaggacccttggtgagagatgttggagggatggtgagtggttattccaaggtaytagagtattcagtttccctttcrtgggggtgtattgctgatctctgttgaaggagctgtttgaaagtcagagagccctgaactttaaactttgagacctgtatactagaccatgstagggtggggaagagggttcagtttgttttgccatcacaacacaattaccggggactcagctggctgacccttctgtttgccagaccacaacacaaatgacctgcttagaggtgacctggaaaatggggggtggggttaggatggatgagaaaggtggggaatagagaaaatatgacatttaggtgaaagaaggaagtcgatgtaggtgggaaggagatgttcaggtacagattgtagttccacgcagatgaggaagatctaattcagtcctcagtgtctgattgggtttttacagggcctcttcagtttgtcagaaaaggggaaggattggttggccaggtctgtggggaatagggttctgctgggcctgtgctttattctatgattgctagttagcaaagtcacctgttgtggtgaggctctgccttttcctctaactgggagcaccactataaaataccttaaaatcatatttcttgggtgatatgtcaaagaccaaattctgcttatgaaagatgtactgctttatgtgtgaacatgagtttttcaagtaygtgggtcatctttattttactacagtatatagagaaagtacggattattcaaacctaatgatagatttcacgagggaaaaatatagaagatatttttctgcactgtatgtaggagataaaacctagtttagagataatgtatgtgcagagcgcagcgcagtgcctgattggcagtaaatagaaagtggttgtattgcattggtgaaaataggaagtctcttttgagttgcttcctggctgaaagaatccctccattggcaaattgttgtgaatctgtgattttcaaattgtggttcatgatcttcctctagaaaggtcttcagttggttttcgggtgacagtgtatgaaatgatgtaattatgtactatttattttaaatataaaaatgcggcttcactactaattttttaatttaaaaaaccttattttcccctctctcttcctccaattcagctgatagtgaagttgttggttctttgccatttctgctgaacttaggaaaaaaattgggaattatgagcacagaggaccccacatcttttaagttcactgccatgtccacagtgcctagcagagtacagtcacagtatttatttactggctgccttggaaccctgagcttcttatagggatcggattttccatggatattaggatcttagtactagtgtgttcagaagattaaaagttagaggtagtttcaaaataaattttatttcacacttttttgttgacgatcatttttattcagatgagaagcctttcccaaatagtgtcattttatgagataaagagtagcattgaagagcttgaactctagagacagcatctacgtttgaatctaggttctagcatttagtagctatagctctgtggtctttttttttttttttttgaggcagagtcttgctctgtcacccaggctggagtgcagtggtatgatctccaactcctgggctcattcagtcctccagcctcagcctcccaagtagctgggattacagggttgtgtcaccacaccaggttaaatttttaatgtattttttgtagggatgggagtctcactatgttgctcaggctggtcttgaactcatggttgcaagcgatcctcctgccttggtctctcaaagtgttggaattacaggcatgaaccactgtgcctagcctctgtgatcttgatgtataatttaacagctcaaagcctcgatttcttctttcgtagaaggaagatgataacggtacgctgttcagaaggttcttgtgaggactaaatgtgataaagcatttatttggcacatagtaagctctcaaaactgatgcygtcactgatagactttatgtcagttaaaatctacggtsatatttttcaagtctgtttggtacaaactttggaaaaatgaggtatatgttaaccttggaggccttaatgctattgttaaactagaaatactcagatgccgtaattaaatacattttgtagtgacttaggaaaagtgcttgcacgtaggtgctcagttattatatgaaatgtactataattgtagaattaataattgtaatgcagtaattatagaattaataagctggtatagaactatgatttgaaaaatctcatttgtgatattatagaatagtgktatataatacagaaaacatttaagtgggtatttaaacagcagtagaaattaatttctgtctcagagttaggaggaaagattacagttacatcttagatgcatttttgcttttctttggcaagagtttcttaaaaaattgtcatgctcttatcacagcctgttctcttgatatgtctatatcactcttgttatatttgcaagtctgttgttggactatatctgcagtgacagatttagattattttgattaaattgactagtcagttcaataaaacgtctattttgagatcttctttgaatttattctgctgcttttacgggttgatacatctgtaaatgtgaattttatatcatatttattctaaattaactgtttagagtggacatggtgattttatttttggacattcaatatgatactgttcgaggtatggtttttggtttcagactctaaatttttgttaggttgaaagattgattccactgtattccagtttgaacttttatcatatgggctcgtctaagtttgttttccacatgagaatgaaatagtacttttgtagataatcttttgtaattactgtattttcttcattctaaaagtacattttaaaactttttaatgtttctgaaattgggacacatcttaaaatttatgtgcacaattattgatggtgtgtcttaaaatcaatgatctttcagaatcatagatatatagtatataccaccatttagaatgaaactctagacttcttatttgcaatggcaatgtgttttctaaagattgctttgacatttaaaaaattttaataattagttgcatgatgcttttttgagaataagttcattttggaaggttttcgctaggtgattcaattgattagagtaggggtttttaggttgactgaggaatgtagtctgtaagggaatatagaaagttgtctagatgagatgaagggttttaaaaaaattcctgctaagaaattactttgcgaatctgcgtatccacacattcatgttctacttggctctcagtaaatttttgaattttctttaactcaagaaatgtatgtgtgtgttttaaacatgttagtacatatacactgcttcatttttctgaacccttagcccaatatattgatgttaaaatgagtgtttcgtatcttctctgttctgtataattttggtaccatattcttcatttaagtctgagtgaatcatgattgttatgattcccctcctctgctattttttttaaagcaaataacagtcccacacagcattcttattgtagtcttatcattcattcctggaacggttaaggtataaggtggagtaatatacattgaaatttaattgtgtattgctccttgacttgtctcaggaacaatgggcagttgctgacttctgtatcatactaacctaagaggtggcactgccttatgaaaattggaaatttaggtgattgttcaggtgatttttgtgtaaaataattttgtcttaaaagttctgatgagggaagtcttcttgtttgacttagcaagataatagttctccatctttcaccttaccagcgtaaaataattagccttagttttccttgccttttaaatggggactgataaaacagatacttagagaattctgtgagatttacctaatcacttttaatggtaaaagatcatcatgggaaaggtagactgtaagtgtgaattattgatacttttcatttttcctcaccctaagagacagtgcctgaaataggtacctttcttwtcccacttgtcaaggctgagaaacttaatacataccataatcacaacttttgagatagaattgaattgctgtcattcaaaacagcaggacatcttacaaccgtttaaatagcaattcttagtataatcttttctgtcaagagacatacaaccattttaggtaacagtagctcaaaatataatattattgactcactgctcagacttcttgaattcatcagtaaattgctttttgtattgaataatatagacctagaattatagggatctggagttcaaattttatatagaattatatgacagaaaattatgatttatcagttttttttcccttagagacagggtcttactcttgcacaggctggagtatgtggtatgatcatagatcactgtggcctcaaattcctgggctcaagtgatcctcctgccttggcctcctgagtaactgggactataagcacacaccgctatgaccaacagtttcctgaattttttgtagaggagtctcactgtgttgtgcaggttggtctcgaatttctggcctcaagtgatcctcctgcgtctgcctcccaaagctcagggattacagccatagccaccaatactgagcctggcccaggatttatgagttttttttttgttttttttttaaacctaaagggcagtataaatataaagcaagatgtgttgtttgaaaattgcaaagaagtttttttatgttaaaaatagttttctttgacagtttaagcatgctttttagaatgcctattcttttggttctcttagtttaaaaacaatttttaaaagttgttcatgtttctgataacaaagtaaacagtacatagatttttttttaatggaaagtaacagtttttttatccaccccctgcccctagttctcccaattccattcccttgaagcagactgtttagctgtctttagtcttactccttctgttggttttctgtacaactcttaataatacacttatttctcattgaattgttaattgaagtaatatcttttgattccctgctctgaaatatgaggatttagtttgcttacctattcttcctttcttttccttcctcccagttaatgatagttaaaatttttttaaaaagattattggttgcctttatagtctaaaaatatatatttaaacttctgtttcttattcctatgaataacatgttttttattctctactttgtaaattggggataatatcttctccatccacttttagctggtttatattagctacacttaattttacatcttcaaagttaataacatttactttgtacagtgcaactaacaaccaatcttctatgctttgtctgtaagtaaaaggccaataaattatacatttattataactaaatattcaatgccagaccaaacagcatattacgattagattaactacaaggccagtgtcatgatctctgggcttctcaatgagtcatagcattgaggcacaatagatcaaatctttctctccccacctcacccccaatgtctgatacttaattaaagttattttacattttagtttgcttcatatttcatctgtgattttcttatgcagctttttttccttctgggatttctgattacttccccctatgcccctttagtagtctgttktattggtatacactctgcagccccctcttgcctgtctcaacctgtttgatttacacccatttgttttgtctygcagaaatatattgaaatttctcactcattggtgaccaccacccttctctttgctgtttattcctttttgcattttctgtatgtcccctacccacccagtggggtcctgaatgagtgagaggtgaaagtgtgtgtgcctagttggccatctttaacctggacttagccactgagttttgaagtgtctgttgtatacttttgtgtgaaatccataaaatatcttctcctatatcaaatctttgagacttctgtcatttaaatatgggcaatatgtactttgtatgcatataaatacttcacagaatccatattagaaggaagttacagtgtgttaaaagagatcacggagtttgttctagttaacttctattttacaggacggaaaactgaggcacagggagagagagcaagcatgtgtgagcagtattcttgctcagggactcaatttaatggcctagcagaattacaatgacatttttttgactttgaatttcttagccgtgctctgattcataatgcctcgccaaccttgaatcacgtggtttagagaagtcacaattatattagtagcatgcagttccttcgggaagttgataccaattctattggagggatcccatttattctagtagtttgttgtcttgaaaaagaagtagaatgaaattgtttgagtttaaatatttttgctcaaattcttgttttgktttttaaagatactttaatcagttattattgatatactgtcacagtaattaccagacaacaggcatccagctattaataaccccatatttaagaaccaaggcaaaggagaagaaacggttttgagaattttttggtatttgatttaacaaagcctacatttaataaggtatgaatgatagttaagggattgccaagtatagtcttagaaaacagtggcgcactttcagcctttttgtatgtacataggatgttagatgctgttaaaaataaaagtagaatgtaacacatgaggatagagcaggcttaaatttttttttttgcatgaagctcatgcaatgacattaattgctcatgtaatattagggtagttctagccgatgaaatagtgttaaacttcaaagtcccaacctggtccaaattagaggctccaggaaggaataccatatgcatcttgatggcagtttcaggtgttggaatgagatcccgaatcatttgattctatcagtcatgatgcttggatttaacttaatatcagctttccatcctgtatgggaatgctctaatacaaaacagaagttaaaatgacccatgaatggtgtggcagaaatttccagctttagaaattttaattagtgctgtcagtggttcagtgaagtcgtagtgttccttccacaggttgcatgcactggtagtctcatcctttagatgcrtcctcaaaaccctggcagaaattgcaactttattgtttgttgratgtgattctttatacagtattagtatttcaaactaatataccaaagggaaatgttattaaaatgtaacgttttaatgaaataaattgttaagagtgaagatatttttaacataatgttctttgtctttattttaaagaattcagaaggaacttgcagaaatcacattggaccctcctcccaactgtaggtaagtactcatggttttttatttacttgtatcttttgcagaaggtgcatttgaactgttggttttatatgcagctgttgttgtagtctgattaattagtaaaaacatcattgttgtttgaacttaagtgactgtggaagacaatggtttttgtcatctctgtgcagaaatggaatgttcagcaagtatgtttgtagtggttgaacggagttgccaaaagtagtgtaatgcaataacagtaagacaatgaaattatagggtaacaaatacactrtgacattttagtggaagaggtgttagggccttaagtggtttttttaatgatagaataatagcatggctaaaatatgtgctatgttgtattgttatcttgttggaatttgatttttaaaaatgcagacacattaaacagtgtttyttcatggtttacattatttcttgtcgtcattggttgtgactaggtaagaatgggtgatttgaggcaatgatgttaaatgtaaaactctctctccctttatgatcatgacctcgaattttctggtcagtgtttacttttargaaagaaaagtgcttacctggaaatggttaatgttataaagatacatggacaaagaggagaaaaataacctcttaccttatgctgctgctttgggtctggtgcagtagttagaagatggctgtttggttatttttaagacacttatttctgttttgagatgagatcagcattggaaccaggccaacctggagtttttctggtttaaaatgataatcttatgcattgaargtgagagggccgattaaataaaaattttcccaacgttgaacgcargtagaatttattgcttggtatgatttctgagtttactgatcttacttttatgtaaaaacaaagataacaattttgtgtaggaaaaattctaataggacttactttgtggtgaatctaatatggttcttcaaatgaatcatgtacagtttataaacttacagtaataatattcaaagaatgtttcactcaaatagaacaaatatttctttgttaggtaaaaccgtttaacytaagactttttgtcactcttaggactgtattacatcaaagccgtttcagatggcagatcattgtttagcttttggtggtcaatgattataagtggatggatttgtggaaaaaccccagtttgaattaaacctaacatcctttgtttcttaggataatatttgttttaatggtctgaatctttaaaaaacccatattattaatatattacatatattatttttgtaaccttttttatgaacaattgaactgataaataagtgaactttatacacttctttgcttaaattttgacaaccccaatcaccggcaaaataaacaactttgttttaataagtttgtttaaggctcatttttaataaatgaaatccacatacagtatcatgtgatgtagactgcaattttgctattagataamtggggaaaggaactatataaaggttattatttaaataaacaaataattgaaccatagttctattaaaagtaaaagaaacgtttaactatagtgtcatctgaaatttggaggtttactttgtctttgagccttagtgacatcattactagttcatatgtaagctcttcataaatagagcaaaatgtrtattacaggttttaatttttaaatgtagaagtcacacataataagcccttcaaacagtttcagggaagatatctactttagttaattttctgacttgggaatttgtaaggaaattctcacttgtgggctgaggattggatagctgataagtttgctttagaagctaggtctgcagtgcagtggctttggctccttttattgattctaaaacagttgcttggactgggtcaggcagagagaaaggttatttaccttcgtatggcactccctttggcaagcaaagggtcctctgtgctgtagctgatagaaaatgtaaaactggttaatcaacacttatcagtgtgcttgtgttacttaatatggatgtttggtgtgcttattaagtgcatcactgtggtctttggactgtttggtgtcaaatatttggttgtggtttgtagttaatctgcccatctgtatttcggtgaaaatgtggttaccatcttcagaaagagattagattgcagtgttagtttggcttatttttggtcaaagttaacagtgcttttgtggttgatttttacaagttctgcactgcctgcattggcctaatgactgtaatggattaatttatcaaaatagagcaaattaaagttatctgcctaatagaagtcagagtcctttacttaatcagttaagtcatatctcatttcagaagaaagcatccccttactctgctccctttgtggattacctctcctatcacacatgcctctcaaaaccctgccttttggttccctgggtagttgttagtctgctwtcacatgtaaagattatatgtgagggaacatctgtgggttttacctgtttagtcagagagtggagaacgattttttctactggttgtctgggtaggggtgggtgtgtgtcacattccactttgagtgtggtttatcctattttcgggaaccttaacagacaacccaatactgtgtgtttgtcaggttagatggaacctctgaattttggtgcatctcttaggtgatatctagttaagcttcttttggaatcatattgaaggaactgtatgtgtttaagcgttgtgcaaatctgttatttaaagaagttgagactatcaagtcaccccgaatcacagcattcagtgtagataaagttttatgtaaggcatttttagaggaagttattctaatatagtattggttaattttttttcaggttttgaataaacaaatattattttaaagaacacctacaaatgatttaatagattgaattatttcatgtaggagatatttgcctctacatatttcagttttttctcactttattgttgtctttgaagtaaaaatgcagtaagatagttttatttttgaagttgggttaaatatgtcatcctttttaaaaacattactcacagtttaatgggtaaatattttaaaacaaaactttatagctaagaaaaaatttctgctcataaaatcgtagcgtctgtagggccataggcatagaaaattacacttcatttgagtgaaatttggtatatgcttagagtatttcctataagtagtggaatatatttttcttggccttaactgtcatgttggctaacataactgacccatgacatttgcaagggttctatcctgaggccttcacagatccactgatcaataaatgttttcatactactgctgagttagaggtgctgggcagttggttagaattgctcrttaccttggtgccttgcacaccagcttagatggatagagtgggtcaaattgatgctttatccttacagacctctaacaggtagattcactgccccttataaatgactacaggttgtaactttcacagttcttcacaaattgttaaaagcaagatcttagatctgtgcatgtcagtgtgttcatttatacttcctcggtgctagtggagaactggcagctagtgggccagcaaatctccagataaaaattaaaattaaaatcgtcatcatccaaaggataacttgctcctctgtatcacagagaagctaacttgttcaaatgctattatgatctgctactgctaaagtttgtattaggtttaygagcaggggaatgacagagaatcyttattactttttggaagaaaagactaaggtaaaatgatttatttggattttgatttttggtctagtaattgaacaagtaaaaggaggaagtaaaccaaaaaagaggatgtagttatactagcagtttacacttctatttctatgtgtttcaagaatctgctcatggaacactggcgctgctttttaattttgtcttttatttgataacagctttattgagatataaagtgtaaaattcacttatacttttaggtttttagtatagtctcggagttttgtaatcatcacagtctgttttgcaatattttgatacctcccaaaaaataatccatgccttttagcagtcactccttccccattttcccccagctctttcaccaccagccctcggcagcaattagtctactttctgtttctatagatttgccttatctggacattttgtataaatgaaatcttgtgtgctttttgtgtctggcttttaaaattttttttacaaagtgtaatattttcaaggttcatccatgttgctgcatgcgttagtacttcttttttttttctgagacggagtttcgctcttgtcgcccaaactagagtgcaatggcgtgatcttggctccctgcaagctccacctcctggattcaagcgattctcctgggtcagcttcccgagtagctggaattacaggcgtgcgccaccatgcctggctaatttttgtatttttagtagagacggggtttcaccgtgttggccaggctggtcttgaacttgattacccaagtatttcttttttaaaaatatttttaattgaggtaaaatatacatacatgatttaccatckttaccatttttagtgtaaagttcagtgaatatacatttatatatttatattctttttttcctcttgatccccccactccccttcctggcctctggtaactaccagtctactctctatttttgagatctacatttttagctctcatgtaagagtgagaacatgtgacatttgtcattctctgctgggcttatttcacttaaccttgcctgtggttccatccatgttgctgcacatgacaggatttcattcttttttatggttgaattaaatattccattgtgtgtatataccacattttctttattcattcatttgttaatgggcactcaggttsgttccatattttagctattgtgaatggtacttgggtaaacatggaggtgcagatatctctttgatacattaatctcctttctttttgatatatactgatatgctttggcaatgtccccacccaaatctcatcttgaattgtagctcccataattcccacgtgttgtgggagggactggcgggagataattgaatcatgggggtggtatcccccatactgttcttgtggtaatgaataagtctcacgagatctgatggttttataaggggaaaccccttttacttggctctcattcttctcttgtctgccaccatgtgatgcgtacctttcaccttcaccataattgtgaggcctctcaagccaggtggaaccatgagtccattaaacgtctttttgtaaattgcccagtctcaggtatgtctttatgggcagcgtgaaaatggactaatatataaatatatatacccagtataggaattgctggatcatatggaagttctgtttttagttttgtaagtaacctttgtactgttctccatagtggctgtactaatttacatcccaacaacagtgtactacgagccttcccctttctccgcatccttgccagcatccgctattgccgtctgtttgatctaagcctttttaacctcagtgagatattgcattgtagcaatgttgagcattttttaatgtaccctttggccatttgcatgtcttcttttgagaaatgtctgtttacatcttttgcccccccccccttttttttttttttgagttgtctctctctgtcactcaggctggagtgcagtggcgtgatctctgctcactgtaacctctgcctmctgggttcaagtgattctcctgcttcagcctcctgagtagctgagactacaggtacatgccaccatgctcagctgatttttgtattttttttttttttttgagatggagactcactgtgtcacccaggctggagtgcagtggcatgatcttggctcactgcaaccactgcctcccaggttcaagtgattcttctgcctcagcctcctgaataactgggattagaggcatgcaccaccacacttggctaatttttgtattttgagtagagatggggttttaccgtgttggccgggctggtctcaaactcctgacctcaagtgatcctcctgccttggcctcccaaagtgctagtattacaggcgtgagctgcgcttggcccttttgcctgttttaaattggattatatatatatatttgctgtcaagttgtttgaactctttacatattctggttactaatcccttgtcccttgtcagatagatagtttgcaaatattttctcccattctgtgtgttgtctcttcactttgttgattgtttcctttgctgtgcagaagctttttaggttgatgtaatcccagttgtatatttttgctttggttgcctgtgcttttgagatcttacacaagaaatctttgcccagaccattgtgctgtagtgtttcaggtcttagattcaagtctttaatccattttggtttgattttttttgtgtatggtgagagataggggtttagtttcatttttcatatatagttatccagttttcccagcaccatttattgaaaagactctccttttcccattgcgtgttattgatgcctttgtcaaagataaggtggctgtaaatgcgtggatttatacctgagttctctcatctgtttcactgatccatgtgtctgtttttatgccagtaccatgctgttttgattactatagctttgtaataaattttgaagtcaggtagtgtgatgcctccagcttcattctttttgctcaggattgctttggctattcatagtcttgtggttccatgtaaattttaggttttttttttttttttttttttttactatttctgtgaagaatgttattggtattttgataaggattgtattgaatctgtaaattgctttgggtagtcttgtcatttaaaaatattgttatagttcttctaatccatgaacatagaatacctttccatttttttggtgtcctatttatttcatcagttttatagttttctttgtatgagtctttcacttcttttgttagattgattcctaggcattttataatttttgtagctattgtaaataggattgctttcttgatttttttcaggttatttgctgttgacatatataaatgccactgatttttgtgtgttgattttgcattctacaactttgctgaatttcttgacagttctaacagtttttttttttggtagagtctttaggttttaacatcacgtaatctgggaacaaggctgatttgactttttcctttacagtttggatgccctttatttcttttctcttgcctaattgctctggcctttgttcctacttgttaccaaataaacttccatttttatggatataccacattttatttttcttctcatcaattgatggatatttatattgtttccacttttttgctactatgaataatgctgttatgaacatttatgtacaggtttttgggtagacatttgttttcatttctcttagatatgtacctagcagtggaattgctgggttatatagtaagtctgtgtttcctgccagcagtgtatgagggcccagtttttctccacaactttggcagcacttgatgttgtcctttttttttttttaatgatagctatcctagtagatatgaagtggtattttgttgtggtattgatttgcattattctgatggatgatggatgagcatcttttcatgtgcttattgtccatttgtttatcttctttggagaaatgttagttcaaatcctgctccattttttaatgacttgtcgttttattgttgaattgtaagagttttttcaaaatacattttggatataagtcctgtacatcagatatataatttgcaactatcttcctccattctgtggatttttttttttttactttcttgatagtgacctttgaaacatagaagtttttgctttttgtgaagtctaaatatctgttttttcttttgttgtttgtgcatttggtgtcatatcttagaaaccattgcctaatccaagaccacgaagatttacatctgtattttttcctaagaattttacagttttagcttttacattttggtttctgatcctttttcagttaatttttgtatgtggtatgagattagagtccaatttcattccttttggcttgtgtagacccagtgtcccagcaccattcgttgaaaagactattttttacactgaattrtcttgatacccttgttggaaatcagtggatcataaatgtgaagatttattgctgaattctcaatttggttccattggtctgtatgtctgttcttatgtcagtaacatactgtctttattactatagttttactgagttttaaatcagaaagtgtaagtattctaactggtttacttttttcattgtcttaactcattaggtaaggcattcccagtggaaatgggaagaggctgtgactggacataaacctaactactgtgtcattttactactcatgggagccattttatagaagaaagtgtttttttttttgtttttgtttttgagacagagtcttgctctgttgcccagactggagtgcagtggcaccataccagcccactgcaacctccgcctcccaggttcaagcaattctcttgcctgagccttctgagtagctggaactacaggcgcatgccaccatgcatggctaatgtttgtacttttagtagagacgggtttcaccatgttggccagactggtctcgaactcctgatcccaagtgatctgccctccttggcctcctaaagtgctgggtttacaggtgtgagccactgcgcctggccgaaaagtgtattttccacatcatagtaactaaaatggtatgtagggaaagtgtgtgtgggggttattttttgaaattatagaataggaaggtattgagacagaaattagaaacaatgtctgtatgcgtgatctctacaaagaacaaccaatgcaaaatctaattattatcactaattatttttcttctctgcttattgtaatatttgtacagcagtttttaacttttgaaggatttctgtatgtgatgtcatttagtcttttcaaccactttctgaaactcctaacattaagtaacttgttcaaggttgcctgagcctcccaaagtgttggaattacaggtgtgagccactgcgcccggccaggaaaacatctttaaggagggatgtgaacttggctttgaagaatgggtgggatttggaaaggtaaaaggaaatagggatggctttacgtaagagaatgaatgagagcagaaacataaaaggggaraatttagtatagttattcttgggacagtgagtttaacaggttggccctccttcccatgtgggaggtaagatttgttaggactttctaggaagggtgttaaaattaccagttgctgtagtttgaggtttaaatactgagtaaaagagagtgaaattgaagttttgatttaaaaaaattgtgtcatagaaattaatttgtaatatggagtggagaaagatataaagagtttgggaatccagtaagaaaagtgttgcatgaatacaggttcaagttatataagacctggtgatgtgataccatgaagaccaaaaaaaaaaaaaaaaaggcagtggaaatgggagacgtttttgaactggcccaccttgttgatggtgtggttttgagagacaaaattaatgatgtcgaggatgactttaaagagtgtgatatttgtagactagaatggtgatactattggcagaagtggatttgtctctatggcctctacggatcttaaaattgataatacatccctctttatttagtttggctgcctggaaactcatagccttatttgctcctcagttttagtaattaattgcattttgtgtagaaacctcaactctctggttgtatttgatttttctacccttttccctcttttatatccatatcttcatttgtactttcatactacatatatttttgtcagccagctcagagtcttttcgagggaggcatattattggtaaacgtacaatrtgaataactgaaagtttatgtgaatgtgtattggttagcaaaatgctggcatagtttttaagaggagttattaacatgataaaatttaaatatacattgaggacctatrttatttatttagggtactgaattatttgtatccatctctttttcctttatctaaaacaggtaattgaggaatatttttaattcaatcctgtgagttcttgactcagttgctacagtgttgagtggttttggatagactttttgaagacaaaaaactttaaataacattggaaatgcgtgtactaagtgactagaacagttaacaagaatggaatagcacctgcaggtgggatagctgcagagttgggctatgtgtactgtgtgagagggagtgagggagcatggtcttgccttatgttccattggcagttcagaatttcaagagtttcaagcttgtttatattctcatttctgtacttccttttataatttttaagatgagctccttcattactgccaagagtatgttttctttttgcctttaccttgaggctgtcttttcacctgaggtacaaccaatatagggctttaaaaggctggctgcttgttatttcaaatggggaactttatgtataatagtttgctgtcatgtacctgtacttcaaaactgtattaagggaagacaactgtctcaataaaatcaccatgagaaaaattctttgctttgttatttcaaaatgttattgttttaagtctgcctttaatcatagctttaaaaatatttatttgctaataaaagaaaatgttgaatggtaaagtgagtttagtgcccattatttctggtctttgaattttttttaaattctttactgctttaaaaacgataaaataatgtgtctgaaaaatatatattaaatggtcacactgggactgtattttataatagcaacagaacattttattattgagtttgcccagctttatatctagttattatttcagatttattaactaagcactttagagataggaagtgtcatattactctccaacatgtaatattttaattcccataccccttttatcttttaagatatcctgaaactgtattctttcatgtatccaaatttctttacggtgattattatgctcgttgatttamaattaatcaactaagctttattgcaaacaaataaaattttttagtatattttaagacagtgtaaaatttgatttttgcatttttgttgtcagtttgctttttgggctatgtttctaaataaatgttcatttagaactgtctacattcttcagaatgtctacatactttagggacctaatgagatgcctttaagggtatatctcaatccgtatttgtgtagaggcagcactttcttctaaaacgtttaatagaatcaggcaaagccataagctaaaattcattttctacttcaatacacagcaggtagactctctccacacactttcgcctatttggaagatgaggcctagtaataatttgaaatgaccaaaggagaggcagaactcttacaccagagccaagatttctgcctgagtatcgaccatttttcctccaccttgaatccagcatccccctcccaacattccgctaccatcacttctcctgatgcttcagattacaactcttttacccgtttcacccagtctggcaagagctctttctttaatccctgcatttcaggtagcattcagttcagtatatctgtgaattagtaaatataattaattatagtagggagctaacagctattgaatgtttccagtatttgaagcagtgtgctaaatgctttaccagcattatctcgtgtaatctttacaactgtctttgaggtgacagtagttttattatttattttaagttttttatttccataggttttttggggaacaggtggtatttggttacatgagtaaattcttcagtggtgatttgtgagattttggtgcacccatctcctgaacagtatacactgaacccagtttgaagtcttttatccctcaccctcttcccaccctttccccctgagtccccaaagtctgttgtgtcattcttatgcttttgagttgaggtgggtagtagttttgtacagcattttatagatgggaagacaggcttggaagggttaagtaactaacttgctgaaggtcacatagcaagtaaatggcagaactaggatttcaaccttgtttctgacttcagagctcaagtgttttgaggtcttgcttttctgtttccatttgcaaaacagatttaggtgaactgctctagaacagcactgtcccagtaggactttctgttatgatagacctgttccttatctgccctgtccagtacagtggccactagccatatgtggacatcgagtatttgaaaggtgactagtgcaactaaataactgatttttaattttaatttagataccaatatgtgacttgaggctactatattggacagcatagatctagaaaaatagctttttaaggttaaacttataagtatatgcttaaacttatgtttatattgggtaagagtaaactacgaggtcattttgatggtgcttgtagttaggtatttatgttgtgtatgtgtataaatacatatatacataactacatactacgtaactacttgtagtatatatttatttatctcccctctgctatccaccattatattctaaggactcttaaatattgtgggagacaatttaagtaaaatacctttgtcagttctattaattggttagatatttattttaaatttcttatcaaaatgaaagcaatattgcaaatgattgtttttaatacagactktgaggctactgaaactggaaagtttatggttcagcagtgtctgcagcccagagagagaaataggacttcctcaaggatgtggagtttaaaagcaaaaccaggactagtattcagtcccgatagttcaatgtgttgcttatttcactgatagaatgtggatgcattttataaacttagagaatttagaaaactcataaataaggaaaattggragttcttatccatgatcatgaggtacattggagaagagttggctgggcgcaggggctcatgcctataatcccarcactttgggaggccgaggcgggtggatcatttgaggtcagcagtttgagaccagcctgacgaacatggtgaaaccccgtctctactaaaaatacaaaaaattagcccggcttggtggtgggtacttgtaatcccagctactcaggaggctgaggcaggagaatcacttgaacctgggaggcagaggttgcagtgagctgagattgcaccattgcaccctagcctgggcagcaagagcgaaactccttctcaaaaagaaaaaaaaaaaaaaaaagagttggatttatttttcctggagaggtgaagggtcatgacagcagtgatgaactgttttcagagccttaacattctttattaagcttattctgtgtgattttggggagtagaactagcgctgctctgttaaagttagagggaaaccactttttttgcttgataaaagccttcatcttcagccagggctttctagagaaataatgggagacatcagtacataatgagagctctacctttagaggaactgaaaatgaatttatttgcttatttcagagagattttcagttattagatgggtgatggtagtactagaattatatttcccagatkctggaccctaaacaaatgaagcagatttttatcagcttttgtcctcttcacccatagattgtgactcatttttcctctctttgccctcttgaaaccagtggtaggtaatttatatacttcattggcccacttaaagcagcttgtatacttgctatcagttccacatcttagttggttagtgaggcttttatttccttctttcctcaaaacttagatttgtaggaagaggaggctataggaagaacatgaataaatgagtctggtttgaggatagggattgtgtgtggggtagaaaacaacacaaactcaggacgcttttaaaatttttcttattaaacaatagtcaacacaagacttctgtagccagatgtttgggggtttctcttcatacaccaagcaagcaatcagttcttgaaatcatcaagcaattgaatcagtgtccacaaattcaattctgacactctctacctggaggtagactcagaaactacagattgagggcttagtcccaaaagattgtatccttcttcctaccagtcacaagtccaggcctcttggaacgtctgactgacttgcttcaaattagggttcttgcaaaccccrtctttgggtttgtttgattaactagagtgctcacagaactcagggaaccatgtttgccagtatattacaaaggatattttaaaaggatacaagtaaacagccagatgaaaagatatataggttgaggtctggaaggatcctgagcacaggagcttctctacccatggaagtggagtatgctaccctcctggcacctggatgagttcttgttcacctttacgtcagcctccatgtgttcagctgtctggaagccctgctgaccctgtccttattggacctcttatggagaccttattacttaggcatgattgattaaatcgttggccagtggctatgatcttaagcttcagtcccctctccaccctggaagttgaagggtaaggttaaaccctctaatcatgctttggtctttcttctggcaaccagcctctatcctgaagctgcctaagggctgccagccagccatcagtcttggcataccaaaagacatcactttgtacattccaaggattttaggagttgtatgccaggaaaacggggttgaagaacaaatactatttcaaaatatccatcactttgctaggtctcagattattgcatgttgtttcataaataccttttacctgacgtagtcaagaaataaaaatattactgttaatcaaatgttaacatacattgagttcatcatctaatggaaatcttttgattattcatttgtttagtatataccccttcaaatttatcaaactgtgtaacaaactgtttagaatcctcctgatttccccctctttcttttggtcctggaaaaaataatacttgcatcctcaaaaattgaataaatgttagtgaagaaaagttatggtttatttgggatgtgttttccttcctacatataaatgttgcatgagccgagaaatcttaggattaaaagagaagtaaaagtttttaaaagattttaaatgatagaatacactgaagaaatcatttttgctctttgcgcatacattgtttcatttataatcgattaagagacaattatttaaaaacttcgtccaatcctacgaaaagatgaccatcatgtgtataggcaaaggcactattctgtggcacagtttattagagtagaatgatttgagaccaacatgcaagtggtgaactggaagaaggtgacagattcagctgcaagtgctgaagggaaatctttgcctgaaggtagggcagtttcctaagagtggcacagyccattgctttaagcatgaacattttggtgtcaggctcaagttagcaggcgaatgtagccctgcatttgcagtctttggattctaggtggctggttagttggtgagtaagggagactgtaggggtgcagtggagtgagggagttggcaayagcctgagcctgtaggggaaaagtgagatggtttagaaaatgtgagaaagtaggactgtaagagtttgagaatcaggctcccttgactaaggtggggcaggattggacaggaatagtatcagtctttttagtttaaggtaaaatatttgcattcttatcaaagctgttgtacatcacttcagtaaatgctctgtaatagcacggttcataaatgatattaaacagtgttatggtcctactttgcaaacccctgagatctgaagtgggtggaatagaatagataaatttgcattttaagagggggtgaacaaaggaattcagtttactgttttgttgcattaatgtaaaaccctttggaaatttttagagtttatataatagacactttgttttttggatgatatcctaaacattggaacaaaaccttatgcattttactctaaatttggttataaggcacttctgggactacccacatggcttggatgatctccaagtggctttagttattaatattataataacaaaagaacctcattataagttttgcctaaaaggtaaaatggaccccaaagagaacattagaagtagcctccaatatttaagtagcagacttactcagttcttgattatctgcattaatgggaaattaatagtttactatgtagtataaggtgaaaatatgtagtatttaaaaaactacatattcatgggatatgaatcacagatggtattttgaatatattataatggacagagtgtttgaaatactaaattcagggtttaaatagcttctatcaaatgtgtaaatataagtgttataaaatgtttggtaaatatttatcaaaattatcaaatgtcaattatcctaaattgattttttttccttcttcaaattatgtattggccagatgtatcttaactttgaggtcagggggaaaagctgttaaacagatctcatgatttttgagcttacttgggtgtgggttggtgaactggttgctgacaaaatctctgtacagagaaagagtgttgcacatggtttctgtcatcattctctgtgcccttttttttttttctttctttttttattctccagtttgccatcattttgagaagtgaggtgtttggagtgggacatgaccaaactgagtgcagctttgtaatcagccagctggggactcctgactggactttagagattttggtaaattttggttgagcagatctttagttttctgtgtggaaggtagtcagagattgatgttcagttggacacatacattcaaattcactcattgaccttcagctcctccatggtcagccccatcagctgggaatccagctggagagttttgattaatttagaaaatagagcctgcattttagtaagcacactttcctaggtaagagattaggtaggcttaaatcgatatttacgtgttgacagcattgactttataagttagatacagtgggggtggttgggattgatgctccatagtcttttggaggcttgggaaggaggtagggggcagtctcttgctgtactaatctctaatggcttagaataaatgtctctttctaagtgtttattagagttaagcttgaattagggttggatacatgttatcatgttgttaagcggtaagagtttgtcacaggttaagaatagtctccatgtttgataaagcagctagtcagaaattaatagggaaatctgtggataggttcaaaatggtattgggggcctgggaaatagcagataaaattatatttttgaaagaatgtcaggcgctgatgtgttcagaaaatatctcctactaggttaagtgaaatgagataagctaagatacattttgaggttaacattcatttaacattaaatattttctaagggccaatatgtgatcagcactgtgctgtatactggggatgcaattatgaacaagatggaaggcatctccagcctttgtagagcttatgttttagctgtgaagacagactggaacttgtttaaaaacaaaacaaaacagaaaaattgcctttatgatgagctggggaagtaaacagacatcataattgctatgaagaaaaccagggatgagttttagtgtggggttctagttttatttygggttgagaaagcttttctaaggaggtgaaatcttaattgagagcaaaaagttgttaggtacataaggtgtgggggaccattagtattacaaactgcatgtgctgaagctcgaaagcagatagctctgatgttcagggagctagctggaagaagtctggtgtggctggattgagggggagtggggagtgggcaggggaatgctgttgtacaagatgaggtggcagaatgaggttgtggccaaatcaagcagagtttggcttttattaagatcaatctggttgctagattggaggtgggtaaaagagtagatgctgacagtcatcaggtgagagaggatggtgttatagattatggcagtagcagtggagatagaaagagggtcatttgaagtatgttttttgaaggcaggtggacaggatttgctgatgggtaaatggcagagttagggggactgttagaacagagaaagaaatcatggggttgggtttgagtctgttggggaaatggtggtgcctgttttgagatggggaagatttctgggagataagtggtttgatggataggatcaagagttctgttttggatgtgttaattctgaaatgtctgagacatccaaatggagatgtcaagtaggcagttgaacatgagtttggagctcagtggagagctggaaatatcaatttgaattgtcatcaaagaaatatttaaatctgtaggaaatgatgaatttgtgtgtggaaagaatatagacagacagtaatactcaaaaccaagccctcgtaacattcagaaatgggtgaactagcagctagcagaggagtcctaaggagtttgccatctagggggtaggaggaaaaccaggagagaggtttccatgaagttgagagaaaaagagagtcccctgttcttagtgagtacatctaaaattaataattaatgaaattttcaagtgaatacgaaagtagaataaagttgtaattactttcttcaccgggaaagtaataagtaaataaagactatttagtggcattgagatttcaagagtaatttcttcagtaattttgcaagattattcatattacctactcaaccagactccataattgggctcaggagggaaggctttcccttagagaagcagagttctgttcgtctgaatgttgtccagtcaggctttgggacttaaaaatgcttttgaggattcttaggtccttttttttttttttttggcctgtggactgaacatagctgttcagtgtgtatcattatttattgcctttctcttactatagattatttctcacaggagaagaagttattgctggtagcatgtcagtttacatgtgtctagctcccatctctggaacacataattaagtgtggtcgacatatattcttcttcatttttgccrttgagaaagctgtcagaaatgttacatctggagaacaggaaagactaccctcaaagccagcgttggcctaagtgtactcttaaacatttcctgtggatgtgtggaccgcctgtctctctatctcttcatgacttctgcctgtgtcttgtgtgtgcagaggccaaatagtagtagcagagatggaaaaccttctcctacacatgtgcaccagcatggtcctttgtctctctctttcatttgctcttcaaggcttcgctcaaatactgcttccattctgtaattttctcttcccagcgcacccgtgggacctgttacattgagttagaggcagtattacacggtggtttcttttggagagactggctagactacgtatacatagcctcttggttagttacataccttctcagtgcctcagttccttcatctgtaaaaccacatggggttgtgtgaggattatatgagttaatacatgtaaagcactcagagtagtgcctggcatataagggctcaaaawttgttagttgttgatgctgttgttgctgtttataaggcttgcgtgcatttcttttcttcatttgttttgggaatggtgaaggcatataatgtattattcattatcttcttaatatgtttcatgtaatagacaaatatttttatgtagttactaaggcagataacttctgcatgtcttatttttctctaaaawggtaagcatacatatamgtatcttgttacttgtgtgtgaccctagattgcttggttgtcagtatctcttaataaagattttccctttcatctgtttgtagaagcctcatcagctgggctggtattagtaaaaggaagatgactagaaaattcacttggagatcacatggactcttttattattaaattaaataattcatttttcatgtatacaacactcattaattggggttgtgtttattggtgaaaacatttttttcttaaaatgaaatctttaatttttttayattaattatactyagtatgaggcacttttgcttcattcttacaggtaggcgaattgtagaggtcttacgtctttgctgggcctgccaccatcaatagtttaggagaataatagcttttgaaatgtataaggccttacttaaaccaaaaaatatgctttacaatgcaatttctaacagggtcttaattcatttgttaatatttcttcagaacgtgggcttaaattttgttttaaagtcttatacaaactcttgaggggaaatttttttttagygttttccgctttagtttgtcttttttgatgatgcagctcaacaaccataaatacattcrggactcacaggttgacattttaatcattccatccacaagtactcagaactgtggggacmtggaataaatatgagatatggcctcttgactttagtttataatctttattgttgaaaaaagccyggttcccttgaaatagttagagaaaaatattggaaagcatatagaaggaagtgtggtatagtagtaagataattcatctagtagtcttgttcatttattcactaaaagcctgctgagcactttcatctccttagtgtcaaaacctgagttttgtcacaagatccgccactgtgaaattgagcaartaccattcctttaccagatttactccacctgccttgtaggatcatacatgatcatgtatatgaaagcttctagaacactaaagcattgtgcaaatgtaaagagttatataatgttacattgttcgggagaggccatgcctgtggtagcagttaaaaggaacaaaactttgagagttgaactagttaggttgggtgggattttccccttaagaaaccatcatcagtaaaggctgttttttaaaagctagtatataggattaataaagtacaggttgagtatctcttacctgagatgcttgggaccaaaagccttttggatttcagaatttgaattttggaatatttgcatattcataatgagcgatcttcaggatgtggcctaagtctaaacatgaaatgcatttatgtttcttacacaccttatacacatagcctgaaggtagttttatttctcccatggggacgctgaataaactgtgtattgtgtgcctgcgatctgactgggacctgccacatggggttaggtgtggagtttcccacttgtggcatcatgtcagtgctgaaagtttttgattttggagcatttcagatttcagcttttcagattaggaatgttcaacctctagccggagaaagaagatagttttctataagatggaaaatttatccagtcatgcctttttggaacatgcgtgaatttgttgagtaactgaaatgtataccttcaggttcctaaatttaatttatgtgagataaaatttgtttctaagtagttttatatttccctcttctttgaaacagtatgagtttaacattttcttattagtttaggacctcattctcaacctcagttatgataccgtaatatagtgatcaattatggaactactaasttatcgaggtaataggactcttgtctcatgccctaagaaggacttcaggctgcccatttaaaaaaattgagatataatttaaataccatacaattcactcttttaaattatgcaattcagtagtytctagtgtactcacaacgttgtgcaactgtcactgtcattacttccaaaacattttcatcatcctagaaaggaaccccacatccattagcattctccattccccyctcccccccagcttctggcaaccacgaatcgactttctgtctctatggatttgtctattctgggcattttgtataaatggaatcatacaaggtgtggccttttatatctggtgtctttcacttaacataattaaagcatttagttttataataaaaaaggctaggcaaataattgagtggaggttgggaggtttaagagattccattaaagaagaaggtgaaataagggggagagatgagatcagatgaagttcagatttagcaaacattgagtattacataagccaggcactgtgctaagtctgttgggtgatagagcagaagaggttctaaaagatatgctgtttttccatcctttgcttgatgatttggactttgagtagaaaggacagttttatcctcttgatgtacagaattacagaatgaattctttgaaaaggagtaggaaagcagatcagtcagcttttgcttagtatgatttattcctcttttaaagtgtaatttctgtttctacctagtttcaagtaagttttgaggcatgtagggctctgccacatgatgccagccttgtcctggggtataacttttttatggatcataaaggagcctggttaaagtttggaactattatagactgggagaataggcatctcaataatatccctttataccttactgcttattatttaaggttaggataattgggtaaacattcaccattcacattttattagctggtaactacgctttctcatttattccagagaataaggacagtccttcctttcgcccaattttacttgtttttctaaattttatttctttagcttagcattgcttacagggcttaattaagttttgtttcatactgttctggagctatactagtggattacccaatgaaattttttttcctatgtggtaaattgttcaaacacttaccaaataaacagctaacttgggtaatactttatgacaatgtgtagctgcatggcagtgtgcttttactatcaatactcagttctggttttatcatattattcttaataaatagtaacaaccaagttatttggtttagggagaaaatctgccatgaggtatctttgtgtctgtggcacacagccacactrtttatgccattatgaacctgcaaagctcactgtgtctgcagtgaaagctgcagatgaaatctgataggatctcttggcattttcacttctacgattatacattgaatatagggatgaattaagccctttgtattgttgagctgtgattaagattactggatagcttaagtattttctctttttgtccacatacccagtaacttgggtcaaaattattaatccattagagtgtatgcagtaactttttttcttttgtagtgttgtgacctttaatgatggagcatttcatagatgtgctaaatgaaggttaataacggtgaaaatttattatattgattagctacttatatattaacacttaaggtttaattttatttaaattttatttttcttaggctgtctgtaaaatcttctcatttaaaatttagcttctgtggataactgtttactcattgccccatatgaatatttaataggcacttcaacaagtccaaaacaacttctgcttcccctcccaaatctgcttcacccagtctttttcatttcagttaatagcaaatctgtctttccatttaggagtcattgattcctttttctctctcactctacgttcattctgtcatcaaatcgtttttgtcctaccttcagaatacatctagagtctaatcacttcccactttctccattgttactattatggtccaagccgtcttcatatcttgcttgagttattgccacaccctcccaacaggtctcccttcttccatccttccttctatatagtctattcttaatatgacagccagaatgatcttttaaacatgaaagtgagatcatattactccttgtgttcccattacaatggcctttgagagtgatcagggccccctttgtctctctgaccttattgcttattctcttgatcactctgctgccgctacgctggcctcttccctgtccctcaaatgtgccagacatgcttccatcttagggtctctgcactggctatttcctcaaatgtcatctcggtgagkctaaccctgatcaccctacctcaatacacccaattayttttactccgctttttctttccgtaggagttaacacctcctaacatttacttctatcagtttcttatgattaactgtgttgtgtattccctcccattagaatgtgaatatctgaaagacacttacagtttgaaaagtgcctggaacrtagtaaatgttcaataaattgcacttcattgatatttrttggcaacataacattattaccactcctcagaagcctgccacatcttccctatcatttatacctctccccaagcctgatgtttttgtttcttgtcttaatatagagacaaggtcttactttcacccaggctggagctcagtggcatgatcatagctcactgcaacctgtatcttttgtgctcaagctatcctgctgcctcagcctctcaagtagctgagactacaggattgggctaacacacctagctaaatttttatttttatttttttgtagagatggagtcttgctgtgttgcccaggctggtcttgaaactcatgacctcctgccttgacctcccaaatgatcctcctgctttgacctcccaaagcactgggattataggcatgaatcatcaagcctggccaagtctgatggtttttaaagttgtttttagtatgattgaatatgattctcatacaaataaaggtctgctgtatagtagtaatctgttgcatagaactttgttcttcaggtgaggtgtgagtcacatccttttatcttgtttgttttttttccccgccccccgcccccccagtatagtcatgagcagtccacaaagccaaaatatacattgaaacagaaagactatttgttaaatttatggaaatatgttttaaattgtttctacaatcttctttgcttctaagaattcaaatgtcacaggaataaaagctttcaccattttaccagaatctgtaggatttagatgatggtcattttattctgttgacagtatggagcactttgcagatggatatcaggttaattgttatattgaaaagtgaaggagtacattctactaacagtctttctgctgagaaaaatctaattattgccrttaaggtggcattaagttagtaaattgggtaaataaacagttaaaatccccaaatttcttataacatgccataattgctttgcttgaaaatagttatcggccaggcgcagtggctcacacctgtaatccctgccatttgggaggctgaggcgggaggatcacctgaggtcaggagttcgagacctgcctggccaacatggtgaaaccctgtctctactaaaaacacaaaacttaggtgggtgtgttggcttatgcctgtgatcccagctacttgggaggctgaggcaggagaattgcttgaacctgggaggcggaggttgcagtgagctgagatcatgccactgcactccagcctgggcgacagagtgagacgctgtttcaaaaaaaaaaaagaaaagaaaagaaaagaaaatagttatcactgaatagaaatataagatgatcaaataactattgaagttaaaggaaactacaaagaaaatctccaaaggacgccatcctagtttgtttttttgttaagcactattcacctgctgcactagagccagcaatatggacaaacaatactactattaataccattatttgttaggcacttatgaggtagcaggtctcatgcttcatcttttatgctcccagcagttctgtaatggcagagaatagcattttgtttttctaaatacattcaatctctgagcctcagtgttcccctcagacctctcagatcctgggccctttaccctacattttatggcccgcttccctttctgcttctttctgatcattttattttgtatttgatgttctgagttttctctaaagaacaacatatattcgttttagattaatggctttaagaaaatcatttattgttaagaatagtacagttttgtggctcagcaaaaaataattctactgttcagccataatcattttggcaagtttacagcctttttctcaagcgttggttagattaactgaacttctgaatacctttgtggtattttaaaaatctgaaatcacttgtctacaaatagtatttcttttttttttttggccttaaagttttaataatgaaatttttctatgtagtcctctttaaaatatttaagtatagtaggaagcagcagagtttgttccacctaatgtcaattcagagaacattttacattttatattaaaattatgatgccttaggatcgttcttttacctgtgtatttattcattttcacactcgggagttttagttgccactccatatcagtggcacagccatgatgatttttcccttgtccaatcatgaaggtttaaaaamacctgtacagtttttagtctcttattatgatatcaattaaggtgattttataggaagaatatcaattaagggtgattttataggaagaaaaatgtaccctgcatttcattkggaaaaaaaaaaaagaatcaactattaaatgaggaaattaaaaaaaagtttaggtttaaaaagaaacatacttaggagaaacttttaagctgcatatgccttatgtgagaattttaaccaagaaagactaaatgatcttttataattatgttgtcaccatatgtttgcagattcatatttgcatacattatttatatataaagatagattagtgtctagctttatgtgcattccattttgtaatacacattcttttagcaggttatgtatgtcttcatgcagttgacttttctgtatttgtgtgctttagcctccttaatgaagatttttacagtcaaagtggaagagggccaactttttattgttagtacagcaacrtaattaactatacaaggtttgtttattatagctgagtactagaacaatgcttcaaagaggaaaacgtacagagaagattagtaaataacatagcaatgtgtgaggctggccaattgtaataatgcctttattgggtggttcttgaatttgtaagcacatgcttacatttttcagataataggaatgaaaatgtgtaattttaattgctatttctgttgcatttttataagaaaataatggaaactttgcttggatgaatgattgtattggagaaatgttttgtatactttggttctgaaatactttgagctcttttatacaaatgaatagtgttaggtaagactccaaggtacaaattgtattactgctgaatcagatctgaagaacagtgataaattgcaatgatttatttaattatagaataaaaatttgcagtcgggttaataccatgcagctgatttagagctttgttcatcccacattttctgggaaggtcctgatttcagatactccttattttcttcttatgtaaatacatttagaaatgagaatatcctttgggcttattacggtctagtaaatgtcattaaccaatattttaggtactgtggagatacaaaaaagatgagatagtggaaagatgttgagattgtaaccatttacataaaaatgggagggtcatmggaaaaaactccatagagcacttactgtctgataaaagagggtatataattgataarttttacaatgtttgaaagaagatgcaaagaaaatattgagttctcatatgtggtaaacattatgctgaatattgtcatattctcatttatttaaatttcacatcaccctcattttatagttggggtgactgaatctcagagagtttacattgttgaaggtcatacaaagccaaaattcaaatcctaactgtaaatcttattttctttctattaaatcattataaatgaatggaaacccttaaaggatataattctttcaaattgactgaattgacacaaaatattggatatctttatttaaatactacaactaaacttaataaaatatcacaggccgtatttagatcttaaatttattcaggtagtaagggacctttgatatccatagtaatagcatgaataattgaagccatcaaagtaataagccaattttgtttagtaataatatattagagtagaattttacagttttaaagggcaccatcatatctgttatcttagcatcttaaaccttttatgaggtctaccaaataattggttttgtttcctcttgacctttgtaaaatgaagaaaaaccatrcctctttgagttcataaactgtgttttgcatatttacacacatacatcttttatcctcccaccaattatttgacctgaggttgaacacttaatggataagtaggtggataaaatgataagtaaaataacacatttaaaaaggagaagcaggagacttcaggtgaatagctacccataagttgttgaaaataatcaatatttatatttattggcatccagtcaataaatatatatgagctagtcttgttstatcacccaagctggcatgcagtggtgtgatcatggctcgccgaagcctccacatcctgggctcaagtggggctcaagtgatccttccacctcagcctcccaagtagttgggactacaggtgtatgccaccatgcstggctaattttttttttttttttttttttcgagatggagtctcgctctgtcgcccaggctggagtgcagtggcgcaatctcggctcactgcaagctccgcctcccaggttcacgccattgacctgcctcagcctcctgagtagctgggactacaggcgcccgccaccatgcctggctaatttttttttttttttttttttgtatttttagtagagacggggtttcagtatgttggccaggatggtcttgatctcctgacctcatgatccgcccacctcagcctcccaaagttctgggattacaggcatgagccactgtgcccggccatgcctggctaatttttttaaaattttttgtagagatgggggcctttccatgtcgaccaaactgttgttaaattcctgggctcaaacagtcctcctgcctcagcctcccagagtgctgggcttatagccactgcacctgaccagtaaagataytttgagctttgagtagtacctggttattatcggttaaaaatgaaacattttataagtcttttgttctattgaaaaaccacagtggaatatgtgtgtcttccccaagaattatgacaaagcatgtggatcattgcctggcatatagtaggtatttggttatttattaagtaaattaaaaaccacaatgtagactttctggacttaaaaagaaaaaaatagagacggagtcatgctgtgtggccaggctggtctcctgagctcaagggttcttcttgcctcagcctccctagtagcttgggctacatgtgtgtgttaatatgctcagctaatttaaaaacgttttttattgtagagacagagtcttgttatgttgcccacgttggtcttgaaatcctagacccaagcagtcctcctgcctcagctcccaaagtgcctttctgggctttttattcttttttsattttcttcagaaagccagttcctaaataataaaaaaagtaaaagaatttatttattctctttttattccaatttattaattaatactcaaatattaatgtaaaactaggttggtttcatattgttctggtactgtattgtcttattttttattatctgatatctgaatcagaaaataacctagttacatattatttagtctctgagtgtattttttttttttttttgagacggagtctcgctctgtcaccaggctggagtgcaatggcatgatctcggctcaccagaacctctgcctcccgygtacaagcgattctcctgcctcagcctcctgagtagctgggattacaggtgcccgccaccaagcctggctaatttttgtattttcagtaggacggggtttctccatattggtcaggctggtytcaaactctcaacctcaggtgatctgtctgccttggcctcccaaagtgctgggattacaggtgtgaggtattattttttaagtaggagtwtttggacctaaacaggcagaattcttcaacaaagtacaatgaaaggcatttctttgacagtagcctgaatttggaggctcatttgcaaaggcactttccactgccactctaccccagaaattgcttatgaaataattctggcatttactccttcttcctcccctcccccttttattaaagagactagcttgtacaaagtcatttgcaaattcatttgtggttctccattttgattcagatagcaactctaaagactgagttataaaagtctttagactttgcagtttaaaagaacgataatattaccatgtaaaaattctgattagcataaagctttagaaagtccgttgcgtataccaagccaagtgcatttttgtctccaattcccaattctaatcaatttcgtcctcatttttcactattgcaaaagtgtagatcatgatgcccatcttttttgtagtcgagtacattttttcttccatcaaaaaagcaattagtgtcctgatgtacttcagcttcacacatttctgtagatgatttgatcaggttgttgtcttcacgacagacatctgattgtttttgaatgtgggaacactccttagacaacatggccagaattaacccacatcctcactggtgttccacaccttctcatatgtaggagaggaatttctctgtcatttccctgagactgcaccttaattctctactataatccttgactgaaggaaaagttaggcgatcaggtggaatttttaaattgttccacaaaaaactgagttctgctagctaagtggaatgttgagaatttagaacattcagcacaataaaatataaacattaaatttgtatggcattagaaccgcctttagaatttttagtggaagcgttagatcacatgcatttcactttagttaatttctgtaaattcaactatgtatagtcttctttacgaaaaggagagaacatacttgagaaatataatttaagagtgcaagtgagagtcattcagccattccttttattctgatcagtgaatgtgtgtccctgagtgagagatggaagaagtccttttagttcttgattgcatttcatagtgtgaatagctcccttccctgacagtgatttttagtctttcctaaacttagtcagctacttcatctgttattcagccgaatgaacagtgagtgatctgttgcagtgctagaggaacattggctgttttggccttattgaagaatacttgaccgactgatttaagagctattcaaaggtaattttgagtatgcaatttttgccttttgcaactaccttaggaccttattctggccgggtgcagtggctcatgcctgtaattctagcactttgagaggctgacgtgggaggattgcttgagcccaggagtttgagaccagcctgggcaacatggcgaaaccttgtctctccaaaaaatacaaaaattagctgggcatggtggcacacacctgtagtcccagctacttgggaggttgaggtaggaggattgctttgagcctgggaggcggaagtttcagtgagccgagattgcaccaccacaccccagcctgggcaacagagcaagaccctgtctcaaaaaaaaaaaaaagaacctaattctggagtaagatatgactttaccataatttgtgaattaaggattaacaaggtcagcagagctgaagccaagtgaaagcatttgagaacaaatgactgaaaaatactggatatatggtaagatatgtgtagaaaaagaactctttaagcaattttcattaaaagcttcttagtatgttttccagatactaaaaattttggtcactggaaacaattgggaagcaaagagattgattcaggataaacgtagttaaattagccaagattagggattccagtgaccttgaaaataaatgtgtagattaaaattcaggttattttaatttgatggctaaaataaaatgtgtgtattaactcagatttttttttttttaaattttgagayggagtcttgctctttcgcgcagactggagtgcagtggcatgatctcggctcactgcaagctctgcytyctgggttcatgccattctcctgcctcagcctcccaagtagctgggactacaggcacccgccaccacacctggctaatttttttgtatttttagtagagatggggtttcactgtgttagctaggatagtctcgatctcctgacctcatgatccgcctgcctctgcctcccaaagtgctgggactacaggcgtgagccaccgcatccggcctaacagaattttaagaatacatattcttgaatgattgcagagtaggtggtaagttatatgccagacactgatctaagtggtttgcctgtcttacccctttaatctaggagggtagatagatgctgttctgggagctttatggatgctagttctcagtaactctgagtaaggactgttgttaccacaaccttgcaggtgagaaactgcaatatagtcacaattagaaacttgccaaagtcacagccattaagtagataagccatgattcagatcaaaccacctggctccatttcctgtactattaacctatcttctacgctggtctttaattctcttttacattattattgtctcatctgtaaaggttcaaatgcctactccagttccttgaagtggctgctttgaggtttctgagaccaggtctatactcagtaaaatttttctgaatttgtattagaggttgttttatgaacatgagattggaaaaacggtggcatgaactcacttctaacttcatatcaaactagatcaccagaaaactatttagtcctatattttagtattgtttcctcatattctgtcaatttttgttagatgcatttgtatgaagaatatttctgcatctgcgatgaaactattgaatgcattgtctcttatgatactctgttccctttataagaattaatgtgataaattattcaagaatttagtttcasagaaaagtttctttccttatgatatggcatacttccttctatcagtcattaagaattatatattctgttgagtttttctgtttgctttggctgcaagaaagcttggagttatatgtcacttcaattatagtaactttattagcctaggcttctgatatgggtaatttcttctcagtcctctgtggcaggagtatttatttattggagacagagtcgcactctgtcgcccaggctggcatgcactagcaccattatagctcactgcaaccttgaattcctgggctcaagtgatcctcctgcctcagcctcccaggtagctgggactacaggtgcatgccatcatgcttctaattaaaaaaagattatttgtaaagacagggtcttgctatgttgcccacgctggtctcaaactcctgggctcagtcctcccacctctgyctcccaaagcactgggattactgtgcctagcctgtgacaggagcttttaattcatcgtgtgtgtatcagcttcagggagctgatgaacccttctgaaatgatcagtaaacttgcttgtgtgcaagcttgtgtgggaatctgggggagcatcgttagcttctctcagattttccatgacctcctcccaacgcccccctcaaaaagatgaagaaccgttattctctgggttgacttttcattttatgttataatggtctaattgtgtatctcttattgtaagcctctggtagtctctttggtgatagttgggctattaatcatacatttacattcgaatcatcatccartttctcagttgtcagaaagttaaagagcagcctctctgtaattttaaaaacatgcagtcttggaaacttaagaaagttgtcgacatgttcatgcaacccatgtacctactatgtttgttttctatgaaaggagcttgtctctcttaaattaccttaaataagtaatagtaaattatttgtaaagtgattcattattaacttctgtttagaattaacatattcaaaccataaagcatgtatgcaaacagtattcccatatcctttttctttgttttttaggtaagcagaaaaagttataaaattataataatctctctcgactatttatgtattaggagatccaactctccaaaaaacatggctagggtaaggttaccagcaatgatttgctatacccatacatttataggcaaatgctataccattagaggaaaataaagccagtgctgctaacctcatcactcagattaatttccacagctgtcattttaacagtgttattataggtcttcaaatgaaaattatgttaacaggtactccacataaatgtgctgtaatccaagggggcacatgtattatatttttgattgtagtaagctttttggcctaattgactatttctctgcaacaaaaaaattagttaaactggaaaagcataataaagctatatgctctttactaggtgatatcttggtggtttaaatttacaagttgtgtatacatacatattttcctgttgaagacttgatgactgactgaaaatgtaccagggtgtcatcaccataaaagttgttgcatctrtgaactatacagcagtgtgtatgatggtgtgagttataataaactattcattagttttttgctgcatagttttaggatgctgtaacagtgatcttgaggactatgacttaaaaaaatgaataacactatcattcagcttgctactctgcagacaatgtgtatgaaaaagaatttgtgtgatttaacctcagacattaaaattggtttgccagtaaaacaaaacaagattaaaaaaaatttttttttttaattttttgagacggagtctagctctggcgcctaggctggagtgcagtagcacgatctcagctcactgcaacctctgcctcctcggttcaagcgattctcctgcctcagcctcctcagtagctgggattacaggcacgtgccgccgcatccagctgatttttgtatttttagtagagacgaggtttcaccrtgttgctcagtctggtcttgaactcctgatctstggtgatccacccacctcggtctcccaaagtgctggtattacaggcgtgagccaccacacctggccaccagattttcttaaaccatattatttatgtcccygcagtagaaagaacacatcaaatctgcagcattgccttgtcattcattatggagtgtattttactttcatatctaaattgattaatcagcttgtaaagagactagtaagaatccaataatggctgctgttttctaaattttatcttttaataaagaatatgtaagaagcatttattgaatgcttagcatgtgaaagatactgaaataggttctttggaggcatgcagagatgacatattccttacctgtggtttaagggttaaatataaaagaaaataaaactaggagaaaacagatttggaggctgacttctagaaatgttagaagaaattataaagaaaataataatcgatttgactagataaaattacacactaaaatgcttttaaaaagtatgtctttggtgaagagggaggaaaagaaaatactccacaaaaagcaaacaacaaactggaaaaatgtattcacagtgagacaggcagagaatgacaaaccagtaaaaatacccatgatgactgtgataggtaaatgggcatagtacacaaactgttcacaaaggaggaaatatggttagtaaacaggcatgtgggatatgtgttcagccttgttagtaatctaggaaatgagacttaaaacaagaaattgtacatagtgctgctgaaactactaccattgctactggactgtgaaaggtataattctaaattgaaagcacattggtactgtgcttcagtagcaacaaaaatgttagttcataatctttaattcagtaatttcatataaggggctctagcttatggaaaatgataaaaaatatggactgttacctgtaacaatgaaaatgtggaagtgaacaatattatgtgaagagaaatagctgagtaaattaggattagtccattcattggatggttatatatccaataaaaataaataggcaaggtatatagtagtatgaaaagatgcatatgaaaggactagattatatgtaaattgtgattatgagtttataaagtataaatatgaaaaatccctagaaaaagataatttataatccttgtgctacagtaatgagttgcaggtgatctttcttctgacctctctcaaatagggtatattaattttaaaatttaaatttagatttgtgattttaagaaaatttagttctagctctcaaggaactgccagtctaataggatagaactacactaaaaagaaatgtgctattgacatgaaagagacataaccacatgttctgagagtaccctcaaatatagttttgtattttatggagtgcttataaagtctccaggcatatatctggtggtgggaatgaattaagatgaataactgggtccttgctccaagagacctctgctttagttgaagagactcatttttgcatctaattagaccctgataccaatcacactttattaaatatgccaactgatgcttacatcaagaatgacttgaaagcatggggaagaggtaattttgaccaagggatgctgggttaatcctgggtttagggaacatctggttgcccagtttctggaagtgtgcgtaggtatttgtggggcagtaataggagagtccagtagccggtgtttaagaagctggtccaggctagtttgtgcaagttcctagaaatacagagatgaaaaagcctgtgttctcaagggacatgttgaccagtgtgggagctaataattaactaaaaatccagtacattggcttaaatttgtatgttaaggtatatctggcttcattgaaattcctattcacaaaattctcattcaagatattgtgttgttctaatggaaattataggatactgtgggattatatggaaagggtttgggggtgtttgatcstggctggggaggagtagccaagaaggacttgctataggaggccacagtgagctgggttttcaaagataagtagaaattagaagagagaatggatgtgaggggaagaggaagctggaaaggcagggtgtggccagataattcttaaggtccttgtataatcttaaagggatttaggaactcagcttctttaaggctttttttttccccccttatgtctcatgatatgttagtaagcatatggccatgtttagaagaaagtaatgaaaaggataagccagtgctgcataagtggtttctgaaggcatataacctggccatcttaagaacagttcgttgagaaattgctgagatcagtttaaggagtaacttcctttttttttttttttttttttttgagacagggcctcactatgttgcccaggctggagtgcagtggcgtgatcacagctcactataatctcctcccatgctcaagcgaccctcccacatcagcctcctaggtagatgggactacaggcacacaccactgtgccccgctaatttttgtagttttttttttttttggtaacgatagggttttgccatattgcgcaggctggtctcgaactcctcagctcaagcgatccgtgttcctcagcctcccaaagtgctgggattacaggcgtgagctaccatgccaggacaaggagtaatatttatttgactgttttattaacatcaggcacttaaaataacgcagtgtagaagagaagtaaaagatacaggcttactatttattaatgatttgctgtgtcaacagagagcaaacatttagggatttagtgaggcagctcaaaggggattgagaaataaagttgtagagtcaaagtagagagaaaaagggcatttccagataattgacactgatctaggtgggaagtgatcagtctaagctctctcttttttctattttacagaagtatgagcttctgaacattttgccttttatcacatatggtacctctgtcttgattttcagcagatttagcaaaaatctaaactattttactattggatacatatcacagtatctgggaataatcatactctccagcaaagcagcttctggccatgtgcagtggtgcatacctgtagttctagctaccctggaggctgaggcaggaggattgcttgaacccaggagtttgaggctgtggtaagcaatgattttgcctgtgaatagccactgcagttcagcctgggcaacacggcaagactctgcctctaaaaataaataaaagacagcttctgagagtatttattagtaaacttgctttcccaaaacagcttttgagtttagttctggagacagcactgtgctgcctatcatagaccactrtaaagagatcattctgttttcctgctctttagaataaagctagcatatgagttgcaaccacctaatttttctttcgttcttaatttctggttacagagttctttttgggatacacatgctttttagtgcattatgggaaagacttcactgaagttaataggattgtatttatagtctcatcatgatatttctaattaaaatgatgattgtttattttagccatttgtacatctaagtaaaatattgttactgccttgtcatatttgaatacttgggaatttatagaactgtttttattagccttttaaaggatactccgtaacaaagtatacgtgtgtgtattttcattatataaactaaaacttttgcattgtaatttttgacaaaactgtagcttcaaactatattctttgagcagtatgatttttaattaagaacattaaagttcttagttataaattttaaaaagcaatgaaagtgatttgttgaggttatggttaatttctttgaaagcaattaataaaatccctttgaaattaggatttatatattttcataattcttaagactaaggtcagtagcatgctgtattttctcttctgaattctttctacattttaacacagtgcgttacatatttgatttttaatctttcacgtgggagctttatctacttatctctaaggcctgcatgcgtccttgctctcacacacgcacatataaaatcactttgtccttattactgtccattccattttcttctccctgaggttgccagaaaggcctctggtctagcttgagtaatatgcagtctgtttcagttcttcctaacctgcctgcatgttttgatggaacaccaggcacttatgtaagaatagaagcctatttatttaggtcgtgtgaaccacgaaggaactggcaccaacatattcatttctcccctttgctacttcaggtcttgagaagagtgtgcttttatggaccatgtattcttttctctggatggatgtagcttgtgggagaagctattgtaataagttcttctgaaccacagctcttctgtgtgggtcttcatctttcaggagactccaaacctgaactgtaatggtttcatgttatcatctaaatggaatggatgtaatgacacccagagcacatggctcaggctaagatctttcttggtaatctttctctatccagctcttcatcagagcaggactagctcttcactggttccttgactccaggactgtgaaaccaggaaatgaactttccttcttatatttctgcttctgcctaagggccaatttcataagtggaggtctgcaacaaaatagatgtacttaagcaagatgaagctccattgctttatcttgcttaagacgggtttaataggaatttcttytggctgtttcccgtgcccccccccccccccactttttttttttttttttttttttaagatattagagtctcatgaggcccagactggactctaattcctaggcacaagtgatcctcccacctcagcctccgtagtagctgggactataggcacaggccaccatggctggttttacwttttttttggttcatggtacatttgaaaccaaaacatacccaatatctagtcatattaaaattacttttatctctctctctcttaatttggagaaaatagtattttgtgggaaaatttatagtatataggctggcatttgctttactctcacaatcctataggattataaaattagaattttatgaaatatcctatacttggtgtaattccttattttctgtatttttgcttttctttcatttagatctctttcgtctattcctctactatcattaaaaaattatcttcctaggagaggtgattattggaaatggattaaaaaaaggttaatgagaagagatgacaatacatatgtaactatgtgattggctctgtaaagtatgaataattatactaataatggtggttaagcctagcataggaatgggattggaatgctagcaggatggaatggcaactaaatatgcaagatgagaccatgttattgagcacaccgaaggtaagatcaagaatttacattggattagagaggcaaaacagtcgattcctcacaaggggagcaaagatggtgactagcagatattttcggtaggacaaaaagggagagcgatgtcaccagaagttgagagtagaaaaagagaaaggatgagtcatggtattggaaatagttttgatggaagtcatgttaatagtgatagtaaagagaagaaaaacaatttaaacatgttcgtatcaacggactttagtatggcctgttgaaaaaagtcacctaacctactgcttttgaatgcattgattttaagtagtttgcctttgtatatcagttttgttaataacaacgacagtaaaatgagctgtctacccaaaatttagattattatgttgattataacaaacatctttattttggtaatgagcttataaaaatgaatctaggtcgggtgtggtggctcacgcctataatcccaccacgttgggaggccgaggcgggcagatcacgagctcaggagatggagaccatcctggctaacatggtaaaaccttgtctctactaaaaatacaaaaaattagccgggcgtggtggcgggcgcctgtagtcccagctactcgggaggctgaggcaggagaatggcgtgaacccrggaggcggagcttgcattgagctgagattgttccactgcactccagcctgggtgacagagagagactctgtctcaaaaaaagaaaaaaaaaaaaaaaaaaaaaaaagattctaaccccaggaaaggagaaggtatttgtcataattgtcataatgttttgacttatacaaaataagactttttctgaaacacagaaatccttgacagtttatttctttaagataaccaattttatacaggtgaattcttttaaaattgaacattgtagtggaaaagacgtcacaagtcactttagggtatggaaaagtgtggaacaggggcataaatattaccaaccagcacttctgygggcagtcttcccacatccagtgaggccccctaaatcactgtctacttccttgtatatgtgtgtgtgcgtttgtgcacatgcatgcatacatgtgttcatggccatgaactaggagttatcccaagtgtagctgtgctcgctaagtcttatatttaagttatcttttgggcatggtttggcaagaggttaggtttttttcccttttctgtaaatatttagtgaaagcactccattgtttgctactgaatttttttcttatttttaaaaaagtattgtttgaaaaccttacatgatggcttgcatctgtaattccagctacttaggagattgaggcaggaagatcactatggcacacatatacctgtgtaacaaacctacatgttctgcacatgtatcctggaactttaaaaaaaaaaaaagtcttgactcaaatattgtaatttttcttggagtaaaatttaggggccaaaggctgtattacatgtgtgaatataacatacagaaaaattaccttacatcatatataccctgtggaaattatttggatgattcagcrtattggaagaggttgatggggccctaaccatgaaaaacttcagtgtaagattttaaggtaagaggaccctcgagagttttcccaattctgaaacaaaagtgaaattcaccagctttgcctattaacttttctctgctttatagtgtcaataagaggtgtsgatggaaacacatggaattagatcagtagactgcaaaatcctgcttaagttcattaaatatagtactagtctggaattctcttttctcacaaaagtaaattttttaaattgaaatgttgttatcccttttatgtgatttaaaatagagtttaatctgacatccctggtttatctttttgattcatcacaatggtgtcctagatgtgtatacaacattgttgggttaaaaattactgatttgtgtgtctttgaaagcatctgaaaaggaaatttctaatagttcttttttgtttgatgacacattataaataagcctaatggatatattatgcaatttaaaaacagtattgtctaatccatttattatatgtttataatgctatatattttttaatttaaaaacatttgtaaattattagcctgtgccaaattgtacttgaattattttcagtctgccaagaatgtttcattctgtacttttaattaaaagactgtatatgaaaacccagaaaatatgaaatgtaggatatggaaatgatacagttctttaaaccaattatgtgtaaaaattcacttttttgaaacagcaagacagtatctcatgtgatattgtccctataatctaatttctataatttaatggaacttatggcctgtacatggtttactcctgtaatcccagcactttgggaggtcgaggtgggaggattgcttgagttcaggagttcaagaccagcctgggcaacatagtaaaaccccatctctacaaaaagaaggaagttagcgagcatggtggtgcatgcttgtagtcccagctacttcagagactgagcctgggaggtcgaggctgtggtaagctgtgtttgcaccttggcagtccacctgggcaacagagtgaaaccctgtctcaggtgggggttggagggagacagtaatggggctgggcgtgatggtggctcatgcctgtaatctgagcaatttgagaggctgaggtgggcggatcacttgccaaggagtttgagatcagcatgggcaacgtggcaaaacgctgtctctaaaaaaatacaaaaattacctgggcgtggtggcatgtgcctgtagtctcagctacctgggaagctgatgtgggaggatctcttgagcccaggaggccaaggttgcaatgwgtagagattgtgccactgcactccagcctgggtgacagagcaagaacctgtctcaaaaaaattaaaaaggaaaaaaagaaaagtaatggaactcagtatttggtaagcartgtaactgtggtagaatttttttttttttttaaagcttaggaattacatctgaaagtcttttaaaaagtataatattctacttagaaattcagggtcatttggaatgcattggtaccagaaaaagtttttgttttccttttctcatttctccctccagcttttttgaggtataattgacaataaaattgtgtatatttaaggtatatgacatggtgatttgatacatgtttatattgtgaaacttaccrtaaccaagttagctaacacgtgtatcaccttacgtagttaccaattttttttatgtttgtgtgtgtgagagagaacattaggatgtactctcttagcaaattgcaggtatacagtatagtattactagctatagttaattatgctgtacattagatttccagaaatttttcatcttatacttgaaggttggtaccctttaactgacatccccccatttccccctacctttagctctggtaaccaccattctactctctgcttttatgagttcaactgttttagatttcattcgtaagtgaaatcatacagcatttgtttttctctttctcacttcacttagcataatgcgcttcagaatcatccaatgtgtagcaaatggcaggatttccttccttttttaaatgggtgaataatattccattttattgatatatacacacactgaattttctttattcatttataggtgtatgggcacttaggtcatttctatatcttggctgttgtgaataatgctgcagttaacatggagtgcagttatctctttgatattctgatttccattcctttggatatagacccagaagtagcattgctaaaacaatgttctagttttaattttttgaggagcctccatattggtttccttagtggctctaccagtttacattccccacaagaattgcacagggcacccttttctccacatcctcaccaatacttttctcttgtccttttcataatggccatccagtatctctttatggtttggatttgcagttccctgatgatagtaatgttgaacatttttttcatgtacgtgttggccatttgtatttcttttttggaaaaatgtgtattcagggctcttaccaattttttaaattttagaaacagagtcgtggtctttttttcaggctggactgaagtggcgcgatcatagcccattgcagccaactcctgggcttaaggaatcatcttgcctcagcctcccaagtagttaggactacaggtgcatgycaccacacccagctaattaaaaaatgtttttttgtggagatgtggtctcattatgttgcctaggctggtctcaaacttctggcttcatgcagtcctccgccttggtgtcctagagcactgggattgcaggcatgagccaccatgttcagtgtaggccattttaaaatcaaattatgtggggtttttttttttgctattgagttatataagctgcttatatattttgggtattaagcccttattagatgtatggtttgtaaatgttttcttccattccatagattgtcttttcattttgttgattggttcctttgttatgcaggtttttagttttatgtagttttatttgtttatttttgcttttgttgcacatgcttttggtgtcacatccaaaaaatccttgccgagaaaaatgtcaaggagatttttccatatgttttcttctaggagttttatggtttcagggtacaatgtttaagccttactgtggtcttgaatttttgtctttagcttcagaaggcaaaaagctcytctggaattttgccagcttgtttttctgagtgtacagagggaaattacttcctactgatgaggaaaagcaggcagaagttgctgttacagaacaagagatggagagaaggaacttttaggtgagaggtggaaaaggtgtgttcttagctgagatggagagcatgaggtgatacagcaatacatattaactctgtacttaacacactgactacttgagccattctgactgctcaacggaattttgacacatacttgagttaggtaagcaaagaaccataggtttcttttatttatttaaatcttttatacagatatttgtaaaatctgatgtttatatgtgagagccatttgtgaagatactgtatttaactatttacacaaagatcttttgtgtttttgagttgaactttaaaagtaattaaatgagttaacttgaatagaatttctgaagagcttctgcctataatattgattttggctttgacataattgatacttacctattctgacagtgataggctaacagattcagtcccttattgcttgagtcactttttggaacatgataatagcatcatgtcaccttagtggaagatgctcatcttttatttatttatttttctatagtggatgagggcctttcgtttaagagctacaatgatttgatgtttaaaaaagagggtggtttgaacatagccctgcttaattttaaggagtgcatttgcttatcaaaagatcatttcagtcattttgatttttatagtattttggcaaaggcttaaaaggatcattgaaagtcctgacttcatactatttttatagagcttggttcatagatggtgtatatcttaaaaaatcttagaattcttagcatgtttattattttaaaattttggcgaaactgcataggtcagttgtatcttagaatagataaaagcctccctatttttcttaacaagttctagattagacaactcagactaagtttttttgtacttcgtttcattctacagggtatccgtggtgactaataataataacagttaacattactgagtgcttactatgagtcgggtacatgatcttacataattcttacattaatcatatgatgtaggtactaccattacctatgttttgctgtcgagaaaatgttggaagagttaagtwtcttaccaaaatttaacattctgggagacagaggtagactgcaaaccctaggaagtcttacctttgctccctaatctctacagagggaaatgcaaattagaataagtgtcccaagtggaagagaaagaacattttactgttcgtatctttaggttacacagctattatagctggaccgtgagtttgactctgaattttctatagcaaaaaaataaaaaataaaaaacaaaaaaaggaaaaggaaaaaaaaaaaaggtggggaggacaaaagagttagaatagcacacataaaacctatttcttaggaattctcaaaatccctgtgcgagccacaaaaggagtctctgggagatttgggatgatttcttcaacatcattcctatatcatgtgactttgagtttttaatgggactgcctcttttgatcccacaaagaaattttagaatataatgccaaagcatcatttggtaagaattctgtgagagatcatgatgatgtggcccaagtatgcatggtttggtmtgattcatacataaaatccagataacttaggagaatgaaatggatggcctgtacatttgccagtcaatccttggttttgtatatacttcagaaatcaaatgagcagataatatatttaagatctttgctttgaaattgaaaacaagaaacattgtagtaattgtattcatattattaagcttgcaagtgaatgggtaattatttccaggttaagtgattgtcttacaagtgaagagagtcaatttttcagtcctgtgaaatgcagcatagagatgccaagttagatatagactgaaaagtgttcactacatttccagacaagtcttgtgtattttagtagtaatagcgtcagtagagtattgcagagttgtgagtgcaaggtgagaaagcggcaaacctctctgtgtagaaatgtctttgtagaagcaaattgcaaagggaagaaggaaaggaccagatgtgggaggaggatttttgtttaaggaattgaagaggcttcagactgattatatgctatgaagaaggaacgaatggagaaggaagaattgaagattagaaaagcagtaatgattgatgctgcaaggtgagtatggttgaacttgaaggggatggaattcagatcattgagggtggcaagtggatcatctctactgagaagttagggtgtctttctcacttcagttccctcaccctccccacatggtagtgtggtttagcttagaaaaagtgactgaagttaggatgtgaatgaagcatgcataaccagactggagaggtgactgggaccagcaagcagctgttctatcctgaactctaaataaggcctgctgaagggggactaggggtaaaasatggaataagctaaagaacaacagagaaaccatgaattttagtgaaaataaaatgaatccccttttgccatatctcctccagtgcataggctcactgcctcagaggttccttatccaagaatgcatgtggttgaggccacagggaaccattggtaaggatttctctctcacataggaagcttgttttaggtgggcagtacatttgaaacccacttggaggtctstctaatgttgacagtggggtgttaaagtctcccattgttattgtgtgggagtctaagtctctttgtaggtctctaaggacttgctttatgaatctgggtgctcctgtgttgggtgcatatatatgtaggatagttagctcttcttgttgaattgatccctttaccattatgtaatggccttctttgtctcttttgatctttgttggtttaaagtctgttttatcagagactaggattgcaacccctgcgtttttttgttttccatttgcttggtagatcttcctccatccttttattttgagcctatgtgtgtgtctgcacgtgagatgggttccctgaatacagcacactgatgggtcttgactctgtatccaatttgccagtctgtgtcttttaatttgagcatttagtccatttacctttaaagttaatattgttatgtgtgaatttgatcctgtcattatgatgttagttggttattttgctcattagttgatgcagtttcttcctagcctcgatggtctttacaatttggcatgattttgcagtggctggtgccagttgttcctttccatgtttagcgcttccttcaggagctcttttagggcaggcctggtggtgacaaaatctctcagcatttgcttgtctgtaaaggattttatttctccttcacttatgaagcttagtttggctggatatgaaattctaggttgaaaattctttaagaatgttgaatattggcccccactctcttctggcttgtagagtttctgccgagagatcagctgttagtctgatgggcttccctttgtgggtaacctgacctttctctctggctgcccttaacattttttccttcatttcaactttggtgaatctgacaattatgtgtcttggagttgctcttctcgaggagtatctttcagaaagttaacaaggatacccaggaattgaactcagctccacaccaagcagacgtaatagacatctacagaactctccaccccaaatcaacagaatatacattcttttcagcagcacaccacacctactccaaaactgaccacataggtggaagtaaagctctcctcagcaaatgtaaaagaacagaaattataacaaactgtctctcagaccacagtgcaatcaaactagaactcaggattaagaaactcactcaaaaccatgcaactacatggaaactgaacaacctgctcctgaatgactactgggtacataacgaaatgaaggcagaaataaagatgttctttgaaaccactgagaacaaagacacaacataccagaatctctgggacacattcaaagcagtgtgtagagggaaatttatagcactaaatgcccacaagagaaagcaggaaagatccaaaattgacaccctaacgtcacaattaaaagaactagaaaagcaagagcaaacacattcaaaagctagcagaaggcaagaaataactaaaatcagagcagaactgaaggaaatagagacacaaaaaacccttcaaaaaatcaatgaatccaggagctggttttttgaaaggatcaacaaaattgatagaccgctagcaagactaataaagaagaaaagagagaagaatcaagtagacgcaataaaaaatgataaaggggatgtcaccactgatcccacagaaatacagactaccatcagagaatactacaagcacctctacagaaataaactaaaaaatctagaagaaatggataaattcctcgacacatacaccatcccaagactaaaccaggaagaagttgaatctctgaatagaccaataacagactctgaaattgtggcaataatcaatagcttaccaaccaaaaagagtccaggaccagatggattcacagccgaattctaccagaggtacaaggaggaactggtaccattccttctgaaactattccaatcaatagaaaaagagggaatcctccctaactcattttataaggccagcatcatcctgataccaaagcctggcagagacacaaccaaaaaagagaattttagaccaatatccttgatgaacattgatgcaaaaatcctcaataaaatactggcaaaccgaatccagcagcacatcaaaaagcttatccaccatgatcaagtgggcttcatccctgggatgcaaggctggttcaatatatgcaaatcaataaacrtaatccagcatataaacagaaccaaagacaaaaaccacatgattatctcaacagatgcagaaaaggcctttgacaaaattcaacaactcttcatgctaaaagctctcaataaattaggtattgatgggacgtatctcmaaataataagagctatctatgacaaacccacaggcaatatcatactgaatgggcaaaaactggaagcattccctttgagaactggcacaagacagggattccctctctyaccactcctattcaacatagtgttggaagttctggccagggcaattagrcaggagaaggaaataaagggtattcaattaggaaaagaggaagtcaaattgtccctgtttgcagatgacatgattgtatatctagaaaaccccattgtctcagcccaaaatctccttaagctgataagcagcttcagcaaagtctcaggatacaaaatcaatgtacaaaaatcacaagcattcttatacaccagtaacagacaaacagccaaatcatgagtgaactcccattcacaattgcttcaaagagaaaaaaatacctaggaatccaacttacaagggatgtgaaggacctcttcaaggagaactacaaaccactgctcaatgaaataaaagaggatacaaagaaatggaagaacattccatgctcatgggtaggaagaatcaatatcgtgaaaatggccatactgcccaaggtaatttatagattcaatgccatccccatcaagctaccaatgagtttcttcacagaattggaaaaaactactttaaagttcatatggaaccaaaaaagagcccgcattgccaagtcaatcctaagccaaaagaacgaagctggaggcatcacgctacctgacttcaaactatactacaaggctacagtaaccaaaacagcatggtactggtaccgaaacagagatatagatcaatggaacagaacagagccctgagaaataacgccacatatctacaaccatctgatctttgacaaacctgacaaaaacaagcaatggggaaaggattccctatttaataaatggtgctgggaaaactggctagccatatgtagaaagctgaaactggatcccttccttacaccttatacaaaaattaattcaagatggattagagacttaaacgttagacctaaaaccataaaaaccctagaagaaaacctaggcattactgttcaggacataggcatgggcaaggacttcatgtctaaaacaccaaaagcatggcaacaaaagccaaaactgaaaaatgggatctaattaaactaaagaacttctgcacagcaaaagaaactaccatcagagtgaacaggcaacctacaaaatgggagaaaattttcgcaacctactcatctgacaaagggctaatatccagaatctacaatgaactcaaaaaatttacaagagaaaaaacaaacccgcttggagttggcgtgtagygttaaaagctaaactccaaaggcttttggggctctattgctcttggggacacattgaaataaagaaatgtagagggcactcagagactggactgtgttagctgggaaggatcacagtctgccaggaaatcagttctcaccttccaatgggacaggatttgagggtgggagttggggtaggagaaagggagcagagaggaaaaatttgtaactgtcatgcaaaaggccagttaagagaatctcaactactctgggcaccaaagagcagcttttagtagatagttgagttggagccgggagcagcagcatcaacaacagcaacagctgaaatagcttgtgcaggacattagagctcttcatgggtagagtgcaggaaggccatgacaatggaagcagtaatagaaatcatacagggaggaaaatgatgtgcagcttaatatggtgagatgcccagtagaaaaaggggaaaaatgtttattctgtttataagggagtaacatgtttctcagccgtagcagccccaggggctaagaatcaagaaatagggatcaaaacaataccaggaatttgaaattccttgaaaatcttggtttagagtcccttctgtataactgtgctgaccccagaaatgccttgtcctggtgcaggccccgagtagctcatccatttcctgtctggctaccaccccagcarcaatgagctaggcaggtccctgcctctgggtccttgactgtggtcaagactctttccacccccctcctccttttttttttttttttttgcctctccagtggatgaatttgctccttttgtgtagtgggctctccctgtcacaagatgtccctcatctaaggtgagggtcaggaatccttatttcctgatgctactcctagtctactgttctgtggtagaattgcctttgggtgccatgcatgtgctgcgatggtgtattttgtgcacaaagggcttggctgatcttgtcttttgccgttcctgcactcttttgtatgagagccccacgggcctgggttattctgtacctcaggtaggaacctggaaccaaggcttggagttaggggaaacactcgttctggctcacagataaaccctggggccctgcagggctcgttctgttctccttctccccaagtggttctggtattctggccctgaggaagtatagagtacatacagagaagcagacagggtaggttctgatacaggtaccaactgagtgtttcggtctctgaagctttcagtcttttaacttgccaraaaagaaggaaatggtttgactgaatggrttattactggcatctgatatttctagcttcctgtgtgagaaagtgctctgtcaggtctgatttgtgtggatttttgttactagttacaatgtttaacagtttcaggaattcatttaacacactctcttaggtgtgcaattgtttttctcagggaaatctagtgtttaattacaagtctcagattaagaacgataattgtctaacatttatgaaatcctgctgacaactaagtttatactccatttgttaacaggctgttcctgattcgatctgcttgcatctcttctaacttgtgagtgacttggaaggagcagacttcatcttacttctattcatttctcaattaactatgastaacatacactaggcacccaaaaagttaagatgatagcagtaatgaagagaaatggaccttgagtttcagaaacttgtattctaatggaccttcaaaagatggcaagtattgtgtctggaattggtgggttcttggtctcgctgacttcaagaatgaagccacggaccctcgcggtgagtgttacagttcttaaagatggtgtgtctagagtttgttccttcagatgttcagatgtttctggagtttcttccttctggtgggtttgtggtcttgctggcttcaggagtgaagctacagaccttcacggtgagtgttgcagctcataaaggtggcgcggacccaaagaatgagcagcagcaagatttattgcwaagagccaaagaacaaagcttccacagcgtggtaaggggaccygagtgggttgctgccgctggctcgggcagcctgcttttattcccttatctgaccccacccacagcctactgattggcccattttatggagagctgattggtccattttacagagagctgattggtccattttgacagggtgttgattggtgcgtttacaatccctgagctagacacagagtgctgattggtgtatttacaatcctctagctagatgtaaaagttctccaagtcctcactagattaactagacacagagcactgattggtgtgtttacaaaccttgagatagacacagggtgctaattggtgtatttacaatcctttagctagacataaaggttctccaagcccccaccagattagctagatacagagtgctcattggtgcatccacgaaccctgagctagacacagagtgctgattggtgcatatacagtcctccagctagacataaaagttctccaagtcgtcacctgactcaggagcccagctggcttcgcctagtggatcccgcgccagggccgtgggtggagctgcccaccagtcccgcacggcgcctgcacttctcagcccttgggcagtcaatgggactgggtgccgtggagcagggggtgatgcctgttggggaggctcggtccatgctggagcccaccgccagggggctcggccatggcgggctgcaggtcccgagccctgccccgcggggaggtggctgaggcctggcgagagttcgagtgtggcacgggcagtctggcactgctgggggatccrgcgctccctggcctgggtgctaagtccctcactgcccggggccggycggcttctctgagtgtggggcctgccaagcccacgcccacccagaactttcactggcccamgagcaccrcacgcagcccgggttcccacccgtgcctctccttccacacctccccgcaagcagagggggctggctccatacttggccagcccagagaggggctcccacagtgcagcagcggactgatgggctcctcaagggtggccagagcagacgccaaggccgaggaggcgctgagagcgagcgagggccgccagcacgttgtcacctctcagtatgagtgtgttgtagtgtatgtgtgaaagggagttttgcaatgggagtatgggatgatgtgttagtcatagttctacagagaaatagactatctatctatctatatctcagagagagagagagagagagattgagtgtaaggaattggctcatgcaattatggagaccaagtgccaagatatggagacrgcaagctggagactcaggagagctgtggcgtagtagtttctgtccaagtccagaggcctgagaaccaggagagccagtagtataagttctagtctgaaagctggcaggcccaagaccaagaagagcccaagtttcagtttgagtcccgaagcaggaaaagactgatattccatttcaagcagtcagacaagtcttatggcagggtcagccttttagttctcttcaggccatcaactgattggataagggcgactcacattagggagggcaatttgcttccaattcagctgtttatctyatcaaaaaacaccctcacagacacacttggaataatgtttgaccaaatgtctggacactttgtgccccagtcaagttgacacataaaattaatcatcacagatggtttacacttctaaaacaattttatatagtaagaagcaatatagtaaattctcacaaaagttgttgatagtttctttgaaactgcaactataagagaaatgatggggccgggcgcagtggctcacgcctgtaatcccagcactttgggaggccgaggtgggcggatcacgaggtcaggagatcgagaccatggtgaaaccccgtctctactaaaaatacaaaaaaaaaattagccgggcgtgatggcggacgcctgtagtcccagctacttgggaggctgaggcaggagaatggtgtgaacccaggaggtggagcttgcagtgagccgagattgcgccactgcactccagcctgggcgacagagcgagactccgtctcaaaaaaaaaaaaaaagagagagaaatgatgtacagcaggtccttgaatgacattgttataacactgatgagaaaaaaaaattggtttcattatatatggttttgcttaaagtcatagtttccaggaacctatcagtgacattattgtatacttttaaagcatcatgaaataactgaataagaacttgtaaattgctgaattatgaatcattctcctggtttccagtattatttttattagaagttgacatggtacatgctggttaaaatatgacccaggctggttcaagtgcagtgtggtgtttacaaccaactgatcacagccagttacagatttctttgttccttttctactcccactgcttcacttgactagccatatatgtatgcgtgtatgtatatatgtaataaagtgtratccagatgttaacaaacttgattcttcttactgactgaatcattattgttcagaaaccctttgatacaatgggaaaaaaaatgctgttgatataagaagggagtcaaatattacaggactggactgttgattaaaaaattatttttaaagcacagtagctatgaattactgtgctgttgtatttgtctctatatgtgttgctgatttctgatcttggatcatgtttaaaaccagtggcagtctgtaaataccaacaattattatcttttgatacccttttaagttatgaaactcatattgttgaagaaatacctggattcattaagaaaatgatttttttccctctttctttcccctcttcttcttmtctcttcctttcccgacccccttcctttcctggaaggtctttctgttatatgaacagagtgacgagtccctctctgttgcccactgtgttgcggcaggctgcggtgcagtggcaaggtcacggttcactgcatcctagctcagtagatcctcctatctccgtctcccaagtacctgggactgtaggcgcgcaccaccatgcctggctaatttttttttttgtattttttatagagatggagtttctccatgttgcccaggctggtcttgaactcctgggctaaagtgatcttcctgcctcagaggcacctcccaaagtgctgggattacaggtatgagccatcgcgcccagcctaagaaactgattttcagtgactgtattccttcatatgtgtgttccacaatttaatcctagaattctttggtttttaaaataatgatacactggatattatttataaatattctgagtagctcttattatttctttacagcaaatgctgtgtaggtaataaatggagtgatgtcaaatagtatccattttttttgaagagttttgataaatattgcctaattgcccttatttattcactcatataaaatcaataataattacagctaacttgtttagagtgctggtcaggacctgagctgtatgtggactgttcaatgtaatcctcaaaataactttttgaggaagttgttatcaatgtccttatcaggaaatatctgagtgcctactgtgtgtaaagcgttgtgttaggcagggggactgcagtaatgagcaaccaaccattgttgatgcccacattctagaggatgtgcttaacaattactgtcagttaatttaattgcgttgtgggaaaggctgtgaaagagaaatttgggctgctttgaaagtatatcacacagggtgagagaagcggtgctaagagagaaattatctttgtataaacatctcggtagcctaggtggagtagccaaggtaaaaggacgtgttttaggcagaggcggcagcatgtgtgaaggcactgaggtgctaaacggtggacatgtcccggaagctgaaatagaccaattgtgcctggaatactgaggtgttacagtagattgactcaagataaggctgggcctagatcaaatcctgcattgtgtttctggccacctgaaggatttagtccttcctaagagcaatgggaagcctttgaagtgtttttagggaggacccgtaagatgatttatattttaaaaagaatgacttacctgctttgtggacagtgggtttgtaaagtatgaaattttctattgctctatagtttcagcagtcttattctcagttttataggtagaggtgcttaaaatttttaattaaaaagaaacaaaacttaaaaagaaatccatgatcataggctgggagggagagttgaaagaggtggcttgggaggagaaggaaagaatgattagaaacttagaagtcagagaacacccaacttttttttttgtcacagtgtttggaaaacttaagtttgtatttgaaatagaatatatgttgcccagcagatccygattcattaaaaatttgaatttgagcttctctctatcatgataatgcttgcctccatgtcatctgatttccagagactacgtatctgagaggatgtcacttaagggctttaactgaatgataccaggggctttgcagattgataaggcatggtgtggggaagaaaagtagagataagcctatttaaaaaaaatttctatgtctttttatctggcttgtgatgccagtgaaagtaaggtggctatctggcatgtacacagattggttgttggagagccttcatgattttccattattcatttccttyagacagctcctttagtaacttaggtacatccyaccttcccccaccaagacacaatcagtaaactgattagaattatagttttatggaaaaaatacacttcatttattctaatttttgattttaaattttagttttaagaaacaaaccttttaaagttgaatactagaaaactaaaattgtgctgctcttaagttaaacatttttgactgaaaaattctaatatataaactaaggaggggttaatttacgttagcatagaactccctttcatttaccttctttgaatccttccatgtcttcagaagggaaaaaagctagaaagtttgtaaaatattaatatgctttataatgctttctacctgctaaaatgtatgaatcttagagtgagatcctgatgcagacttgtgtgttcaaaggatcatgctattttttcctttgtacttagaattaagcttgagtgcagcaaatgyataaaatcacaagtagagtgtgggttgtgttttgaagtctttaataattattttctattttataaaaaataaaatagaaagttattcaagatatttcaggatactattttatattgtgagcatttgtactttttgtgaaattttatttttctaatgttgattgtgatttgagactattatataaacaaagattgacaaagacaaagttgcaatttttcatagtattaatattttagcagaataatttttgtacttgcttaaggaagaggaaaaactttttttatttttctctcattctttaaaaacaaaaacaaaaaaatgtgagctaatgtaagcagtttcagttttctaggaaaacaaaggctttcgtgtacatgcttctgatagtagacggtgtgaccatatcatgtatgcgttcttaataatgtctgacattatcagattgattaactcagcatagaacctaatcagatttaactatggttggcagctgtacactagaagaatagtaatatagtgggagaataaaatcagttttttaagaagctgcattaaatacaaaactaaaaaaaattaaaagtgttcattatctcacagtgacatataaagctattgtgttcacacagtggctttcttaaatccatgctgacttatattttcaaagatcggctactgccagatgctagacatgctgataataagattttcatttgataatttgatggtgtaggtttcaggcagttatgatttcctgcaggcttcaagggtcaacgtttgtatctacatactgtgtttactgtgtaaacctcatagactatctaactctaagaactagagccaaaaccactgcttactttttctgggatcaacgtaagtatttctctaagaaataggtcattgcaaagtaatcatttctcctttgttttttaaaaaacgtaatcatgaaaagttaataaatgataagaaagagtcctaaattagggggctataaattaattttaattcttcyattaactgtaacctgggccttaggatttaattagattcagtcactaaatgtttagtgaatgcttactatgtgaaggctgttctgggctctaaggctatgttagtgacccaaacagtaaagatattggtgccattcaaagcacttttttgatgtgctgagaatccctattgaggataacagtcaatagttaattacataagctttgaggactgatttctagactagtgagaaatagccatgacaaaaacagtctcacttgygtaaattatttgcacaatatttttctcttcttgggcgtgatacccattttagtcagtgttctaaagctattaaactaataaaactcaagtgaatagtcaaatatccagtcggcttttatgatttgggattaaagtaacaaaaatagctgataaatgagtggaaaakgtatgcaaatagaatggatcaattgttaccttctgggaaaagagaataactgcttttcagagagcaattttctaaatcaacactcatcaaagtatacttagatcccttgcatattaacacataattaagttatgtatgtatgaaaaacagtatttattaagtttttcctattacttaagatttctaatttaattaagtacaccgtcatctctgactagtttacttaatccagaaaattaagaaatatatttaattcaggaaaaaggaacaattgctgccattttatggtatattaaccccaacaggtcttcattgtaagacaatataatttctgaaggtttggtaagtgcttgaagttttgaaattagataactttctttaaactctagtcttgcataagagtaaaaatattacagattccagaagagttactttgaggagttttaaatgccagcaaggaggtgcttataataaacatatctatttaactatcattgtagctttattttaatgtataatatatctgggatatgttgtgggtccacagaagtatttgttgaattgaattaaatgtatgcttcctaaatgtacctttcaaaacgtattgagcaatcatgtaactacattaaattataaactaataaaatgatcagtattaatgaaatttgaaaccaatttagaataataaaaagaattgattcatggtagaattcagcaatacattttgcataagcacattatgaaaacctaagtttccaaacctcggcagtaaaaaaccagtcatagcaaattattagatgtgatttatgacttattgatagcattaggatagcagtcacatgttcattttccagttttttttaataatttgataattttaaaaggatactaaattatcccttctttactgttcttagaatttatgttcattttactgatgaggtcttgagtcatcgtgtaatgttttaaaggtaaaaagttgggtagaataatcttaccatgtaacttattttttgttgttgtaataaacatggttttaaaacagttgtcactgtttataattgtatcattcattaattttcaggtaataaatggacagatttggcttagtagttgaggcgtgatttcagggactgcttaccctgctttcttcagtatgttaaaaaatgaatgtgagatctaccggaggaaggagaaaggaaaaaaacctttattttccaagttagcaatctgcagttttgggaaacctagcttctggggaaactgaaagcacacrcttggctgaagggagggaaatagcagcatttaagccttccagggtctgtcttacatattcatcagatttggggaatgtctgtgaatgtttacagggaaagtcaaatgcatgtccagatataacattaatataacatacattctatattcactttggggtggggttttaacattaaaatgaggaggaatttggttctttgcatcaaaaggtgaactataagggacaaagatgttttatgtgccatctctgtaagccagctggaaccagcttagggtctatagctgcttatcaggagagaatatttgtaaagctggtgttttctctaatcagtgctgttggctggacccccaaggtgggggtgttcttgttagctagtgtcatgtggtctaccagagtcagttggataatgttttcctagaatgagcttctgcttaactgcaggaagaaaaccttatggcaatgaacaaaccttatagtagttaacagtgtaggcatacatgaccaaactcttttccctgctctggccacttaattttctctgagggtctcatcttagccacagagcccatcttgtctgtcatctaggggtacattgttgacagttacctttgttaccattcaccaatgcttaagatcaattaatagtagacattgtctctcattcacctattaggccatacattcaaataagcatgggagagaaaacacatttgacttattaccacggtaaggttcaaattactgatatcacattcttttttgaggaagcttttatagagaagaaacactgtgggttaggatgggagttgtagcaaaggtaggctgtgggtaccaaagataactaacctataataacctattttggggaagtgtttttattaacccttttatttgtgactcttttttggtattcagaattgcaccccttagtgtaatttttagtggtgagagtcttaagagtactagtattctttgggaaacaaatgttgcacatatggcatcatctttcttcctcctacagagaagtgttgacatggatcaggatcacactggtgccactttaactggaaagttttgagggattgtgaatggtgctagaggtggccacacaatctttttggtccttctttgttcacattttgccttcttttttcccatccgtggctggcagttgacagtgttgaggttgtcctttacttgggaagcctgttgacccaacagcaaccctgatgacccagttgtcttactcactcagaaatggtgccttcttttggtggcatttgccataattgtcctaataactgtgcttgtcacaaaacccaatgcttgggctcagtaaatatttattgactaaaggaatgagtactggagactagcctctatgtttcttactcacttctgtttttactgattctgcttttttccatgaatgttgccttctctcgtgtttcacattcagaattttcttagagaatatcttagtttgggctgctgtaacagaataagtctgggtggcttaaacagcatttatttctcacaactcaggagattgggaagtccaagatcaaagtgctggcagacctggtgtctggtgagagcactgttcctagtttgcagacagtcttctcattgtatcctcacttgctggagaaagaaagaccttgtgtctcttcttttataatagcactaatcccatcgtcagggacccaccctcatgacctaatataacctcagttacttccaaatggcctcacctccaaattctgtaacrctggggacttgagttgcaatatatgaattttagggagacaaatattcagtcartagcagaggtaacacttacgttagtgaggaagaatttttaaagatttcatgtttgttttagatataactacttaaaatacatgggaatgtttctgtaatataaaaaaatgccattgtagttccatattcataaagtgaaacactttataaagaaataacgtggctgggcactgtggcttatgcctgtaataccagcattttgagaggctgagacgaaggattgcttgaagccagaagtttgagaccagcctgggcagcaaagcaagaacttgtctctacaaaaaataaaataaaataaattagttgggcccagtggcatgtgcctgtagtcccaactattctgagaggctgaggtgggaggattgcctgagcccaggagttgtaggctgcagtgagctgtgatggcaccactgcattccagsctgggtgacatagcaagatcctgtctgtttaaaaaagaaggagaaggaggagaaacatgtttttcttaaactttctttaatttggttttatgttaatgttaagaataaataaccagtaaataatcttgtaaatagaaaatactatttctgagaatttcattcgcagtaatattagaaatctattacatctcttagaaatatgatatacaaaatagtttgaattattgttattgaagaggatgtatgccagattttcaagagtaggtttattgtttgtttatgaaataaaacatcaactgccatttattaaatactttctttgtgccacaaagagttttgaatgcaatttcagtctagtcctcaaaatcatcctaaaagattggaggattatgtaaattttgcaaatgaaacttggcttttgaaatttggtcacttactctcaaagctttataaccagcaaggggcaagggctgagacttgaactcatctccgtcttattccaaagcccagccctttcgtctcttctgtattaaattcccattcctacatatggatggccacattgcagtgaatacagttggaaaataatatcagtattggagcctctgggaaattttgttttgctacattgcatttatgagctttcatccaggtccttctgtattccctgtatagttggcgctggatgaatgtttattattaatataatgaatacatatagccattcctttaatgacacagtcttacctgctaataaaattgtgtatcagtttctatcttattatgcatgattttccttgctcttctctcagcagattatgatttttaataaaagcaaagcacacacacaaaattcttgtgttggtagctgataaatttaataggaccttttaggagacaaatactccagcaagtttgtattcactttatctgagttgaaaataaaattgctttgtatgctttagagtaatactacatttgattgtcctgtgccttgtattctgcagtttgacatttagagcttttcgtctttcaggatacaaattctattttgatatgccaacaaaatgatttaaaaactaaatcgaagtttaaaaaaatactgtcagtatattgtcaaaaccggagaatatgaagtaaacttggttcaactttttatactagatacacgttacacagaacatgtaacattcttttgtagaagccagagcaaaaatacccacagtgaattaatttggtaatgaactaggttaatttgtagagaaaaggcttaggtcagggtgagatttggaggtataggatatcatagtaacataaacctatcaaaacatgcagaacatggagagcactaaaattcattaaaaaaatcagattgagtgataatataatgataactttaggaaattgatagaaactaaacttgagccccagtgactccagagatagtctttaaactgttcaggacagctagaacaggttggttttctgattaaaattcttatctaaggagaagttgataaatgctaccttcctgcacttgctcctgtaagttcaggttagtaggtgatgtcccaaagtgccctgaaggcaaccagtaaaaaactttttttttttcatgtagaaaatttggaacttggtgactctacagatgaaattcaggctctgaaaagtgctcacttgctctcaaaatttataatgagcaaggagggaagacttgaagcgtgaacccacttacatattactctaaaactcatgctatttcctctgtattgtgtgagatcaaaacaaatgccatatcatacacgtatgcaagctttcagaaatttaggtcggtggttctctgaccaagcacagtggttyacgcctgtaatcccagcactttgggaggccgaggtgggatcgcttgagctcaggagttygagcctgagcaacgtagtgaggccctatctctacagaaaattttaaaattagctgggcatggtggcacacacttatagtctcagcagatgtgtgccaccacactcagcgaataattttgtattagctggtggaggatcgcttgagcccgggaaatcaaggatgcagtgagccatgatcacagcactgcaatccagcctgggtgacagagcaagaccctgtctcaaaacaaaacaaaacaaagccttctcaaaagtgtgctctccagaggtcacgtgggaggttgttacaaatgcagattaccaggctccatttcacacccactgacaaagaaacttcggggtggggccaacagtgtttaaaaggccctgtccttgattctgatatgtgcacaagtttgagaaccactgctttagatacttttgcagtttgaaaaagaatatggataagagggcctctgaacaatgtagttgttttcctacatagagcaatttggccatgttaggaataaacccattttgtgagtaattaattatagcttaggtgcagtctaacttaatatttttacttcaattccaatctcctttagggatttttttttaactactaaatttggtcaaaatttgacttgtctccctataatctataatatttctattctagattagccatgttgagggaaataaaatttgggtaaatattgcataatatttatattattgaagagacaattttttaccttaaagagaaggcacagtatttaattttaataaattatatgtgatttttaaaaatgtaaagactctttttggccttatttgagctcataaaatatttggacagttatcatgagagtttgctaaaataacgtaaggtgatcttattctttcccattgttttgactaattgttggtaaagaatctttctttggggagcactccccaaggcaacttggaagtgtgtcctgggccgcagttatcattattattatgattattattttttaaaaaagaatctttgaaatgactggttacttgatggtattaaagaattaatatcatacatgtctgtgtgaggtgggggatgataccttggggatgtttaatgggggagtatttgtcttttaaagaagattctcatttcattcataaattttgttttggtgggtacatagtaggtggtgattatatatatatatttaggaatacaatgtataagatataggtacacaatgtataataatcacatcagagtaaatatggtatccatcacttgaagcatttatcctttgtgtttcaagtaatccagttgtactccctgaggtctgttctaaatttataattattactgactgtagccaccctgttgttctatcaaatactagatcttattcatttttttttcatttttctatagcttcttgttggaaaaaaawatatatatatatatatttatatatttacctgttaaccatctccactcccccsaccccatgcctcccactactctccctagcttctggtaaccatctttctacgctctgcctctatgaactcaattgtttaatttttagctcctacaaataagtgagaacagacaaaagtttgtctttctttgcctcatttatttcacttaacataatgactttgagttccatccatgttgttgcaaatgactggatcccattcttcttttatggctgaatagtattccgttgtgtatgtgtccattttctttatccacttgtctattgatgaacagttaggttgcttccaaatctttgctatcgtgaatagtgctgcaataaacgtgggaatgcagatatctctttgataaattgattcctttcttttgggtatacttagcagtgggattgctggatcatatggtagcccaatttttaattttttgagcaacctccaaactgttctctgtagtggttgtactaatttatgttcccaccaacagtgtacaaggattttcttttctcagcatcctcctcagcatttgttattgcctgtctttggataaaagtcattttaactggggtgagatgatactttattgtcgttttgatttgaattttgctgatattcagtgatgttgagcactctttcatatggctgtttgccatttgtatgtcttcttttgagagacatctattcagatcttttatcccccaccctgcttttctttttgagacatagctttgtcatccaggcaggtgtgcagtggctctcactgcaacctctgccttttgggttcaagcgattctgtttctcagccactcgaatagctaggaggattacaggcacccaccaccacatctagctaatttatgttattttttagtcaagaggggtttcaccatgtaggcccagctggtctcaaattcttgacttcaagtgatctgcccacctcggcctcccaaagtgctgggattacagaaatgagccactgtggatggcccttttgcccattttaaaattagatgattaagcttttttttatttatagaattgttttagttccttatatattctggtaatcccttgtagagtggatagtttgcagatgtaatctcccattctgtgggttgtctcttcatttgttgactgtttcctttttggtgtagaagctttataatttgatgtgattccatttgcccatttttgctttagtttcttatgctttctgggtattactcaggaaatctttgctcagtccagtgtcctggagagtttccccaatgttttatttttcatggtataatagtttcattttgatttgagttttgtatatggtgagagataggggtctagtttcagtcttctgcatatggacatccagttttcctagaaccatttattgaagagactgtcctttcttcagtgtatgttcttggcacctttgtcaaaaatgagttcactgtagatgtacaatttgtttctggattctctattttgtttcattggtctgtgtgtctgttttttataccagttcaatggtgttttggttaccagagctctgtagtataatttgaagtcaggtaatatgatttattcagttttgttgcttttgcttagaatagctttggctattcggggtcttttgtggttccatacacattttaggattactttttctgtttctgtggagaatgtcgttggtattttgatagagaatgcatttaatctgtagattgccttcagtagtatggacgktttaacagtattgattcttccaatcaatactgtttttttggtgtgtatgtgtccttttcagtttatttcaccagtgttttgtagtttttattgtagagagctttcacttcttagattaagctaatttgtaggtatttaattttatctgttgctattgtaaatagaattacacttttaatttctttttcagattgtttgctgttggcatatggagatgcttttatagtggtgaaagtgggtatcctttttatgttccagatcttagaggaaagtctttcagtttttccccattcagtatgatactaactgtgggtctgtcatatatagcttttattatgttgaggtgtattccttctgtactcagttttttgatggtttttatcatgaagggatgttgaattttatcaaatgctttttcagcaatgatcatatggtttttgtccttcaatctgttggtattatgtatcacactgattgatttgcatatattgaaccatccttgcatccctgggataaattccacttggccatgataaaatgatcttttaaaatgtgttgttgaatttggttcgctagtattttgttgaagatttttgcattagtgatcattaaggatactggcctgtagtttgcattttttggtgtgcctttatctggttttgacatcagggtgataatggcctcacggaatgaattgggaagtattcccttctcttctcttttttagaacagtttgagtaggattgatagtaattctttaaatgtttgataaaattcggccttgaagccatcaggttctggggttttctttgctaggagactttttattatggatttgatgtcattacttgttactggtctgttcaggttttggatttcttcatggttcaattttggtaggttgtatgtgtctaggaaatcatctgtttcttctaggttttcagatggattggcatatctttgctcatagtgcccctaatgatcctttggatttctgcagtgttggttgtaatgtctctctctttttttttttttttacatctctgattttattcatttgggtgttttctctttttttcttagttcacctggctaaagacttgtcaattttctttctcttttctaaaaacacacagttttgttgctctcgtattttctttattttgatttcatttatttctgctctgatctttataatttcttttcttctactgactttgggtttggtttgctcttgcttttctggttctttaaaatgcatcattaggttgtttatttgaagtttttcttttttgatgcaggcacttggaagtataagcatctgtcttagtactgcttttgctacatcctataggttttgctatgttgtttttccattatcatttgttccaagaaatttttcagtttccttcttaatttcttcattgacccactgagcatatggtttaatttgcatacgtttgtatagttttgaaaattcttctcgttattgagctctagttttattccattctggctagaaaagatacttgacattatttcagttttttaaaatgttttgagacttgttttgtggcctaatatatagtctatccttgggaatgattcatgtgctgaggagaaaaatgtgtattctgcagccgtgggacaaaatgttctgtaaatatctattaggtccattttgtctacagtgctgattaagtctgatttttctttgttgactttctgtctagatgatctgtccagtgctgaaactgggatgttgaagtctccagctattattgtattgggatctatctttctctttagctcaacaatatttgctgtatatatctgggtgctccagttttggctgcacatatatttatgttatatcctcttgctgaattgaccctttatcattatattatgaccttcattgtctctttatagtttttgttttgaaatctattttgtctgtatagctgctcatgctttttagctggtattctttgcacacatatcttacaatgtaaaaaaaaaaacttctctgagcaaaagcaatttgacacttcataacgtctagaaatattttttcaaatgtgatgtatgaataggaagtagcatacaaaaacaaattactgtgctatccctcccccaagaatacatattctctcttcacaccacgtggctgctgctggggcatgggggaggggtggcattggcagttcaagactgtcctaccctcttcagtgactcttttagcaatatgaagttaaaaaccaggtactgttaccactcacctgatgtttaattctcatgaagatgcttttttgtgtagatagttgtcaaatgtgatgttcctgcagggaggacaattggtggaggcttctatttggccaacttgctcctcctcatttgtaaatatttcagtgggtacctgtgatttgctttgaagtacagtaattggagaaagggtaatgagagttaacaaatacggctaaagtggaaacgtggtcagtcttgagctgattattgttgaagctgaatgagggatttataaaggtctgttatgcttttctttctaagagtttgcttgaaatcttttatactttaaagttgagaaaaccaacaatgataccagctcagtacagtactcacacagtgaaggtttgttactttagctggcattctttgcagacataccttataatgtaaagagaaaacttttctaagcaaaagcaatttgacactttgcgacttctagatacaatttttcaaatgtgatggatgaataggaagtagcaaacaaaagcagatgatgaggaaataccgtttaagatgtcactttaaaatactgtactgtgttaccataagtagagtgcatttctagatccttactacattttacacatcttttctgattatgtttcttctttttatacttttaggtatacacattagctgagtactaggaattttaaatgcatgctatttagttttgaacgttcaagtacttagttgaacttaagttatgaaattgtaaaggaatggtgtctaccagtgacattacattaaagcttttcataatcgagttgtggtaagttgttttattttaaatttctaccataggaacagaatggttctgtaaaagttatttttcttactgtgatataattaaaaaatatgaccatacttttgcataaagaattgatagactatttctcttacggagcatatatgcatgcaaaattgactaaagaggactcatttaaaacatttctaaggggaaatttgagttaacacaagggtgaatatattttaagccagtttatattttaaaccactcaataatgtggttttgaaaagtgactttttagaatatgtatgtatatgtctacacacacacacatacgcacacatgcaaatgatgtgtttaccctgctaagcagttagattggtaactatgaggtagcagcttctgtatcttgttaccttgttaggtcagtaaagcaagtgagggggcactttattagtttgtggaccattcttgaagctggtgacgctgcaaagggtccaaggcttgccctctctgctagtctagatcactgtttctgagactgtaatgtatgtgtaaatcacctggaggtcttgttaaaagtgtagaccttgttttagagatctgggatggggcctaagattctaacargctccttaggtgatgccaatgtaggtttgaggacctctcttttttttaatttttatttttttgaactaggggcttgctttgttgcctaggctggtctccaactcttccgttcaagtgatcctcccacttcagcttcctgagtaactgggattataggagaacgtgcccagttaaggaccagctctttgaatagcaaaggacaagcttatcatagttgtgatttagaatttaaaacctcagataaactatggttataggtaatatatttatactaactttaaaaaatatcaaattttattattattattttttggatttaaaaaatgtttctggccaggcgtggtggctctcacctgtaatcccagcagttctggggaggccaaggtgggaggatcgcttcagtccaggagttcaacatcagcctgggcaacatagcaggactgtgtgtctaaaaaaaaaaaaaaaaaaaaaaattagccgggcatggtggcatgtacctgtagcctgtagtctcagctacttgggaggctgaggtgggaagatcgcttgagcctaggagttcaaggctgcagtcagctatgaacaatgcactgccctccagcctgggagacagagcaagaccctgtctttaaaaaaaaaaaaaaaaaaacgtgagcctagggctgcttctagcctatagaatatcttttgctgactagatgcagattctccttggggtagatgcatagcttggccagataagggacttctaggtagaaccatgcacaaaaaggtggttgaatttcagaccttactcactggctgcaagcttttgtgcagtatacaaactcacaaattactggttgatcctacctttgtttaacatctgggcacaaagatttaaaagagtaggaaaaaacatttaaaactattatagtgataacaataaactgcttaaaaggtatataaacaaaacaagaaatctttatctgtcttttcacatgttgtaataataaggcttttgttcacaattttaatgttattttaaaaattaatactgcatttgttactcagtaggtttaataaaatgcagagaccgtatacaagcaacatactgctgactatgttaacttagaaaataaccaccttcacagatttagcagtctagggcagtggttcccaaattcatggtattgggcaaaatgagaaaaataaaacaatgtaatcaggtttttgtatttattaattcattctatttaaggggcttttttttttttttttttttttgacagggtcactctgttgcccaggctggagtgcagtggcacgatcttggctcactgcaacctccgtcccctgggttcaagcaattctctcacctcagccttctgagtaactggaattacagatgtgtgccaccatgcccggctaattttttttttttttttttttttttttttttgagacagagtctcgctctttggcccaggccagagtgcagtggcacgatctcggctcactgcaggctccacctcctgggttcatgccattctcctgcctcagcctcccgagtagctgggactacaggcgcccgccaccgcacccggctaattttttgtatttttagtagagacggggtttcaccgtgttaaccaggatggtcttgatctcctgacctcgtgattcgcycaccttggcctcccaaagtgctgagattacaggcccagataatttttgtatttttagtagggatggggttttgccgtgttgcctaggctgctcaaactcctcggctcaagcagtcttcttgtgtcagtctcccaaagttctgggattacaggcatgagccacctcatccagcttaagggacaactctatattcattatttttggtgttaaaatgtcgtctttaaaacagtattggtggtatatgagaggtatattcgttatgtacctttctgcagacatacatgcccatgctacttttattcctgaccttatttttttttcagaggaagaagttaagaaattagtttgtgggccattcttgaagccagtgacactacatagggcccaaggcttgctctctctactagcctagatcactgtacctctcagagccccactcacttgtctcctaggtgcctcataaatagttagcaacaattctcagtacttcattaaaattcacctcctcctgggagccctccagcctttgaaataacctgctactggctagagtagcctagtggtgaagagcttgaactagacagccttgctctgccacttaatgcctgtgtggccattacatatcttttacaaggttatgtaacctgtttgtgcctctttttgttcgcagttaaaatcaggataattggctgggcacagtggctcactcctgtaatcccagcactttgggaggctgaggtgggtggatcacctggggtcaggggtttgagaccagcctgaccaacatggtgaaaccccgtctctactaaaaatacaaaattagccgtacgtggtgacacatgcctgtaatcccagctacttgagaggctgaggcaggagaatcgcttgaacctgggaggtggagattgcagtgagccaagattgcaccattgcactccagcctgggcaasaagagcgaaactccgtctcaaaaaaatcaggataattatgtatcctttttgtggtggtggttgtgattattaaatatttggcacagtgccagtcacataataagcactcagctgcttcatcaatatcatcctaacgttagtcgttgtgtggacagcaacagattaagtaaaaagttatacccctaccccaattctgtttcagtctttctgtgtttggcgaacttcccaggtgattcttacatttaatacatgtgaaaaccattaccctaaaggtcctttcatagtgaacttcatctaggacttgccaaagccactaacatgaaggagttgagatcaaattcattttgtctaacactatatctcaaatgcataatattgtgtctggcatatagtaggcattcagtaaatagttgtttaatgtgtgtagcccaacttcatagttttatgagataatacggtcttacgttaaaaaaatgagagcaaacattggttctagttatgttatggagaccttaatggggaattcactgaagtataagaattaattctctatgattattctccctatggcttattagaaaaagattgaatgagctattattaaaatmataatatgtatctttcctctagagtaagactaataactgtcatagcaggctcttctccatttatttcgtctttagaaccatcttttttaattttatttaaaagtaaggtaggagatatactttcatttttcttattctctggcataaactttgttttttaaattcagctttagccaggtgcattggtgtgcaccagtattcccagctttttgggaggctgagtcgagaggattcctcaagcccaggagtttaagtccaacctgcacagcatagcgagctctttgtctctttaaaataaatataatacattcaactttagaagtcatacagtactgtttcttttgaattgagaaatagttcttaggcaatgaggatgctcctaactataaaaaagaaacatgttttgtttaccttgaataatttactaggacactgaataaaaatgttaagaaactaattccgcaagaataattgtgtagttatctgatttctgagtgaagcattttcagctagataattctagaagaaaatatttaaataaccttggcagaactttaacgttattcataacaaagatagataaaaagcaattctcacctagccataataataaatcagtatgtgcagttaaactaggaaaaacactaatatttattatatgctttttcctaatgtatcttgtatatatggtcagttagttttataagaggaggttatttgacattagttttcttgctgggaaaacctgatttccagttggtgtgatgttttaccttccttgattacaatcttattctaccagaaatgaaaagataatcaagacgtggctcatctgtttccatttatcttgatcatctatgtagtaagtgcagcgtttagattatttgtatctttttatttttatctttagatttttatctttattagtttttttattagattattttattagatattttattagatatttttgtatctttagattattttatttattattttaaataaatataatatttatttaaatataatatttatataatatattataaaataaataatatattttaaagattttgtatctttagattattttattactttattttattagatatttttgtatctttagattatttgtatctttttattttatcattatttgctctaaagatagtctgttcagatttgttatgacaaaaatataatgatgcaggtaattattgtcttcatccttaaaattactttctaaagccaatcattctgcctaatacagggtcttcatttatttttagctacctgaaactgagtctaaaaccacttctctctacttcctcttgtctttttcatttaaacatgtgtaaattttgcagttaaaaatgataaacctatttacatttagtgttcatctcttcttctgttgttattgctattttccatctctagtccttttcaaaaacacagtggaatggatagtatagatcagctgagattgctttttaaaaggttggcagtgacatcttcatgctaaattctagtgtccattcttgctctctgaaactatctcccttgatttttggagcattgcacttttctccactgctctctgatccttgctttttttgtttatttttttatttttgtttttggctgtctttgctggtttcttttcatgcctcaaagtattttctaaaattaaggccttaatgctatgtttctctgtgttttagggttgcagattcctctaaagagggctgcaagtgacataagggaatgaatggtccaggtgggtacacaattaataagagaacagrtctctgtccaacggggacaacaccactgtttgagttcaacttactatcatgtggggaaaaaaatgtttaatgtaatcagatcttctagtgagccaagagaagtatgggaagtccagatttttatgtgaaatatctcagatttcgaatatcggtggctagtggaagtttgggaatacctacacgagagggagtttggagcagtattccggttggaacagggtttatgtagcttgtacgttgcacagcctttggrtttgttgtatacattgtaatatgcaccacttgcacttctattaagagtctagggattgccttaaagctggattttcataggaagtgcacatttggtaatttgtatatatattgttgggtagtgccctgaagggaaaggttgatggagggattggagcagatgtcccccaagccaccctttcctgccacaatggttagaaactattttttaaacattgaaatctaaataaacatgaccataggcctctaatatgtggcctctgctctgaatcttgaagagcttatagctctcatagcttcaaacatttctaaatagamgatagagatctaaattctagttccctttcagtaagttttcagctggtgacctggacaaaatcacaattctttgacccttagtaggctgatatttraattggagacagttctgtttccagttcagctcggggagctttccattctaaaactcatgatcttattgttttaaatctctattttttaactggcctcacactagtttgcatattatatttccagtcacaaaaaaatatttcactactttagtgtttcttttttcttttttttaaattttattattattgtatgttaagttttagggtacatgtgcacgacgtgcaggtttggtacatatgtatacatgtgccatgctggtatgctgcacccattaactcgtcatttaccattaggtatatctcctaatgctatccctctccccaccccacaacaggccccagtgtgtgatgttccccttcctgtgcccatgtgttctcattgttcaattcccacctataactgagaacatgcggtgtttggttttttgtccttgcgatagtttgctgagaattatggtttccagcttcatccatgtccctgcaaaggacatgaactcatccttttttatggctgcatagtattccatggtgtatatgtgccacattttcttaatccagtctgtcattgttggacatttaggttggttccaagtctttgctattgtgaatagtgccgcartaaacatacgtatgcatgtgtcttcatagcagcatgatttataatcctttgggtatatacccagtaatgggatggctgggtcaaatggtatttctagttctagatccctgaggagtcaccaaaccgacttccacaatcgttgaactagtttacagtcccaccaacagtgtaaaagtcttcctatttctccacatcctctccagcacctgttgtttcctgactttttaatgattgccattctaactggtgtgagatggtatctcattgtggttttgatttgcatttctctgatggccggtgatgacgagcactttttcatgtgtttttgggctgcataaatgtcttcttttgagaggtgtctgttcatatccttcacccactttttgatggggttgtttgtttttttcttgtaaatttgtttgagatcattgtagattctggatattagccctttgtcagatragtaggttgcaaaaattttctcccattctgtaggttgcctgttcactctgatggtagtttcttttgctgtgcagaagctctttagtttaattagatcccatttgtcaattttggcttttgttgccattacttttggtgttttagacatgaagtccttgcccatgcctatgtcctgaatggtattgcctagcttttcytctagggtttttatggttttaggtctaacrtttaagtctttaatccatcttgaattaatttttgtataaggtgtaaggaagggatgcagtttcagctttctacctatgggtagccagttttcccagcaccatttattaaatagggaatcctttccccattgcttgtttttstcaggtttgtcaaagatcagacaatgagggctctgttctgttccattggtctatatctctgttttggtaccagtaccatgctgttttggttactgtagccttgtagtatagtttgaagtcaggtagcatgatgcctccagctttgttcttttggcttaggattgacttggtgatgggggctcttttttggttccatatgaactttaaagtagttttttccaattctgtgaaaaaagtcattggtagcttgatggggatggcattgaatctataaattaccttgggcagtatggccattttcacaatattgattcttcctacccatkagtatggaatgttcttccatttctttgtatcctcttttatttcattgagcagtggtttgtagttctccttgaagaggtccttcacatcccttgtaagttggattcctagatattttattctctttgaagcaattgtgaatgggagttcactcatgatttggctctctgtttgtctsttattgstgtataagaatgcttgtgatttttgtacattgaatttgtatcctgagactttgctgaagttgcttatcagcttgaggagattttgggctgagacagcgggattttctagatatacaatcatgtcgtctgcaaacagggacaatttgacttcctcttttcctaattgaatgccctttatttccttctcctgcctaattgccctggccagaacttccaacactatgttgaataggagtggtgagagagggcatccctgtcttgtgccagttttcaaagggaatgcttccagtttttgcccattcagtatgatattggctgtaggtttgtcatagatagctcttattattttgagatacgtcccatcaatacctaatttattgagagcttttagcatgaagagttgttgaattttgtcaaaggccttttctgcatctrttgagataatcatgtggtttttgtctttggttctgtttatatgctggattaygtttattgatttgcatatattgaaccagccttgcatcccagggatgaagcccacttgatcatggtggataagctttttgatgtgctgctggattcggtttgccagtattttattgaggatttttgcatcaatgttcatcaaggatattggtctaaaattctcttttttggttgtgtctctgccaggctttggtatcaggatgatgctggcctcataaaatgagttagggaggattccctctttttctattgattggaatagtttcagaaggaatggtactagctcgtctttgtacctctggtagaatttggctgtgaattcatctggtcctggactttttctggttggtaagctattaattattgcttcaatctcagagcctgttattggtctactcagagattcaacttcttcctggtttagtcttgggaggatgtatatgtcagggaattaatccatttcttccagattttctagtttatttgcatagaggtgtttrtagtattctctgatggtagtttgtatttctgtgggwtcagtgttgatatccccgttatcattttttattgcatctatttgattcttctctcttctttattagtcttgctggcggtctatcaattttgttgatgttttcaaaaaaccagctcctggtttcrttaatcttttgaaggtttttttgtgtctctgtttccttcagttctgctctgattttagttatttcttgccttctgctagcttttgaatgtgtttgctcttgcttctctagctcttttagttgtgatgttasggtgtcaattttagatctttcctgctttctcttgtgggcatttagtgctataaatttccctctacacactgctttgaatgtgtcccagagattctggtatgttgtgtctttgttctcgttggtttcaaagaacatctttatttctgccttcatttcgttatgtacccagtagtcattcaggagcaggttgttcagtttccatgtagttgcacggttttgagtgagtttcttaatcctgagttctagtttgattgcactgtggtctgagaggcagtttgttgtaatttctgttcttttgcatttgctgaggwgtgctttacttccacctatgtggtcagttttggagtaggtgtggtgtggtgctgaaaagaatgtatactctgttgatttggggtggagagttctgtagatgtctattaggtccacttggtgcagagctgagttcaattcctgggtatccttgttaacttcctgtctcgttgatctgtctaatgttgacagtggggtgttaaagtctcccattattagtgtgtgggagtctaagtctctttgtaggtcactcaggacttgctttatgaatctgggtgctcctgtattgggtgcatatatatttaggatagttagctcttcttgttgaattgatccctttaccattatgtaatggccttctttgtctcttttgatctttgctggtttaaagtctgttttatcagagactaggattgcaacccctgccttttttgtcttccatttgcttggtagatcttcctccatccctttgttttgagcctrtgtgtgtctctgcacgtgagatgggtttcctgaatacagcacactggtgggtcttgactctttatccaatttgccagtctgtgtcttttaattggagcatttagtccatttacatttaaagttaatattgttatgtgtgaatttgatcctgtcattatgatgttagctggttattttgctcgatagttgatgcagtttcttcctagccttgatggtctttacaatttggcatgtttttgcagtggctggtaccggttgtccctttccatgtttagtgcttccttcaggagctcttttagggcaggcctggtggtgacaaaatctctcagcatttgcttgtctgtaaagtattttatttctccttcacttatgaagcttagtttggctggatatgaaattatgggttgaaaattcatttctttaagaatgttgaatattggtccccactgtcttctggcttgtagagtttctgccgagagatcagctgttagtctgatgggcttccctttgtgggtaacccgacctttctctctggctgcccttaacattttttccttcatttcaactttggtgaatctgacaattatgtgtcttggagttgctcttctcgagaagtatctttgtggtgttctctgtatttcctgaatctgaatgttggcctgccttgctagattggggaagttctcctggataatatcctgyagagtgttttcccacttggttccattctccccgtcactttcaggtacacccatcagacgtagatttggtcttttcacatagtcccatatttcttggaggctttgttcatatctttttattcttttttctctaaacttctcttctcgcttcatttcattcgtttagtcttccatcactgataccctttcttccaactgatcacattggctcctgagtcttctgcatttgtcacgtagctctcatgccttggttttcagctccatcaggtcctttaaggacttgtctgcattagttattctagttatccattcgtctaattttttttcaaagctttttacttctttgctattgtttcgtatttcctcctgtagctcagagtagtttgattgtctgaagccttcttctctcaactaatcaaagtcattctccgtccagctttgttctgttgctggtgaggagctgcgttcctttggaggaggagaggcactctgatttttagttttcactttttctgctctgttattttcccatgtttgtggttttatctacctttggtctttgatgatggtgatgtacagatgggtttttggtgtggatgtcctttctgtttgttagttttccttctaacagtcaggaccctcagccgcaggtctgttggagtttgctagaggtccactccagaccctgtttgcctgggtctcagcagcagtggctgcagaacagtgcatattgatgaaccacagatgctgctgtctgatcgttcctctggaagttttgtctcagaggagtacccggccgtgtgaggtgtcagtccaccccctactgagagrtgcctcccaggtaggctacttgggggtcagggacccacttgaggaggcagtctgcctgttctcagatctccagctgcgtgctgggagaaccactactgtcttcaaagctcagttggaaatgcagaaatcaccagtcttctgcgtggctgacactgggagctgtasacgggagctgttcctattcggccatcttggctcctccccttccttaatgtttcttcgcttaattaatctttcttcccaatgtagttcatttcttagtttctttgtctttaatcattttcctgataattcagacttgtggaaaattgctgacacatgtccattcatcctcctggcccttttatttctccttgtcagtatagctcgtatctttgtaatttcctccattccaggagttcttgaggcttgggctctccatgattactttaggtttctctgtctcccagtctgtgatgtcccttccagccatatccagtctgttttcaacaaaattctgaccactctacttctattttcaaaagccccagtggttcttatttcctgcctgcaaagtatgtttctttttcggattttcagagactatataatatttcccttaccctatccaaccatatttcccactgtgaaatagttattactacaagttaggaaagtatcttattaccagttatgccttttgactttatttattgcaatttccccaccactaaaatagcttcatttttttattcctttggcaaaaacaccgcacattcttaacagctgagttccatgcttttcaggaatcttctctggtgacctgagcacacaccaacctctcctttctttgaacttctgttacatctaatgagtgctgaatagcttatcatctaaaatcctagatgcttctagagctggaaagtagtaggcatcagctaatcatctgtgcattgtataaatgacagaacatttgtgatttgcccttgatcatattatttaacagcagagcctaaattagatctgtcagttaatttcctatatacagcttgcctgaggtagcatgaaagcagccatagaaaatrtttaaactaatgaatgtggttgtattttaatataatgttatcaaaaacggactgcagtcctgctttggtttgtgggctatagactgctgatccctgttctagagtagtaactaacaactgcttcccctaatttttctcctttgtgttgattttaaaacaatgaaacacataaaccaggggtccccagttcccatgacacatacctgtggaacctggtggcacagcaggaggtgagccagtgaagcttcatgtgtatttacagttgtccctcattgctggcattaccgcctgagctctgcctcccgtcagatcagcgatggcaytggattctcataggagcgcaaactttattgtgaactgtgcatgtgagggatctaggttgcttgctccttattagaatctaatgcatgatgatctgtcactgtctcccgtcacccccagatggggaccatctagttgcaggaagacgaactcaggtctcccactgattctacattatagtgagttgtataattatttcattatatattacaatgtaataataatagaaataaagtgcacaacaactataatgagcttgaattatccggaaaccactcccctcaacccgggtgtgtggaaaaattgtcttcccctaaaccagttgctggtgccagaaaggttggggaccgctgaaataacagaaatcctcactactgcttttatttagaagcattttcagacaaggaaggatgtacaatttatttttattgtcaggtataaattttccatgtttaattcagctttagaagtcatatgataatgtttgaattgagaaacattactcttaggtaataagaatgcatttaaatatatcctataaaatagacacgttatgcatgagtgaggggtgcattttcagtgacaagtataacacttgaaatctgaagaattgttggtcttccatacagcgtacttggaatgaaacaaaggtttacaacaagttactacaagaggtagaaatagaactagggaacaatttgtttcatctactcaagtctgttgaagtataataattaacttctgaccattcttggccttttaagttctcagggctctcctcataggaattataccgttaaccctgctctcctgggcaaatttcaaccaatgtaattatattcttagtcttacctgaattctctccatagagtgtaattatctgagctggattcttcccagggcactgggctttagcacagctactactctccctatctttagtccacgactgttgggtaatttcatttctgctcttgaacagttagctactatcctgcctgaagaattggcattttatgttgagtagtgtacatttgatttcactgtttaccttgtataagattaaaactaaccttagcaggccacttttgaccgtgggcaggtcaragacgtaagtgtggtgaaattatagcagaaggggtaaatattttcaaataaagatcgtggaatcaaaaacatagagaccttttaagttttgatgtcaaaaaccrctgtttttttccacattattaaaattagcagttaagtttttttcatctccaggctttatactcttaaaaattactggattatatctgtgaatatttgttgtgttagaacagatttagtatacttttaaaatttgtttaaaatattactaaactcatgttaatgtaaatatattatgaaaaatatattttgaaaaatcttgaaaagagtggccttgtttacagttttgccagtctcttaatgtctgacttaacagaccacagctgtttctggaatgtcttgtgatacattattttacttgaagtatgtgaagaatatcctcacacataatatgtaattggaaaaagaatgttttaatagctttttcagataattgtggatatttttcttcaataatacaccaaaagttaacaagtggtaatttctgtrggttaattgctatgtggaatctgaaatcatatcagtgaacttttcattgttttcattctttgttacattgaaatctaccagcctgccttaataccgggtatgcatacatttattcacttattcattggagtgtgtgtgtgtgtgtgtaacttctatttttttttccttgcactttgagtgaatcttacccatgcatgattttgtaatatcaagtattggtcatttggaaattattggctctctgaaagattatgcagactttccacatgttgatacatttcattatgtgatatcaaaaagtatcatttttaagtaacaccaccgatcttagaaaaatcttcaagtctttattggtggcagatacaagttttccaaaattctggtttttgtttgaaaggtcaaattttatcattggcgacaagtactgtcattttttcccatgggaaagtcttgttcagtcattattttcagaagtatcagctgaataagcatagtttgtccatcattgtttcaattaaaaatggcattccataacagctaattcagcttgcagctttaacaggtatacaaatgctttccttygagacagccatcgtatttaggtatgcagtagaaatgctttatgcatgctcaaaggatggtttttaatacaattaataatttttgctgctttatcaagaacaagtgaagctgaatttttatttctcttttaactgcagttagtacagtttagatacattgcggtgatttgaaataaggcaccaggagttttacctgctgttgtttttgcatcagcagtataaatgtccactcastgaaaatggtgaatgaggtcttagttttattatgaaaatagttttgacttccttgactccctgaaaaggtctctgggatgctcagagggaggtccgtgtgccacatttgaaaatcatggttataagccttgcagaggacagtgtttaatggtccccttttcttacagttattaaaatgtagtaaccattctttttattttttattttttacagacaggctctcactctgtcacccaggttggagtatagtggtataatcacagcttaccgcagcctggagctcctgggctcaagctctcctcttgccttagcttcccaaagtgctgagattacaggtgtgagccacagtgcccaaaccctaacagctcttttgttttatttcatttactttggtattctctaagactattattatgaaactttgctcatttttctaggcctttattctcaattttattattttgttcaagggctgacatgaccatattaacaattatccttagatgaacctttacaagttaagtggtagataaaaaaggaagagactgaaaaagtgtttaagaaaacatttactagcaacytacgtggccactgaaatatttaaaagaaactaattgaagttaacttttcattttataacagtgattgaaaatcaactgctttgtctgcccaaagcattctaagtctattctgttatttgaggaagtcatttgactgtctgtgtctcagttctctgactagctgacattgctgtaaatttggtatgtatgtccaggaattgaaataggcctccgtggaaagaaatacaattatttatttaaactctctaacagtagtttagttgtggcttggatctaaagacaaatattagccaatccagtctatatccccttccccatgcattcattgtgtttgtagaaatggtatatgtctaagtatcaaacgagttgtatctatcaaagacaaaaatattctggttcaaattatagataacaataagattccaatcaaaacaaagaggtaaataaatatctggtcatgatccttttgtttatactgcaaatgtcgatattgcttagtggcactgattgatgatttatggccacacatgtacccattgtttctacttcactcctcctggttggctttcttatagtaccattcttccatgaggaatggcaagtaaataaaccagttgatacctacggagcaagaaccaccattgaaccatggatgctgattttagaaccttgctcaactgatgggtgcatgatgtgcagaaattttatttgactattatttataacaatccagacagacctgttactcatttttagattttctttaaaccagattctattattaaacattaattcagcaagagattaagcaaatctcaactgatgacttaaggaaaattgacacattttctcaatatgttcataggaattctcttgtttaataatttaaagatattatagactttataatacaaaaaagcaacagacaagctgatatttttggtacgatattatttataattcaaagaaatgtaaagagtatgctaacttggagatgttttggttggaaatggtgcccacatttgatgactttctgcctccctttccgttttgtctttccatgtgtcttttaaaaaatatatactgttgcagtttcatagctgtcaatgtcttctctttctgaggatattaattaataaattcttcctccctctgtatagtcattcwtcaagttgcttttttctgacgctttcaggtctagtaatctttggttggttgagtgtatttaattgtggaccaggttacttgaatctcctaaggcattattgcttatttatatactgtccagcttccaaagtttattgcttttacctctactccctgtacctccataatgatgtatttatgacgttttacaaattttgctctatcatttaaataggactttggaaggtagcagatgatagtgtgtattttgttctcatctttacttgaaataatttgcttatttaaatgaaagcatctagacagtaattgaaaccatgagttgagttcagcaagtactaaagtcaatatgatagcttaagaaaatgttttagcaattatatttttatattgatatagatcccattaaacagtcatatgggttcaggagtattagttatgaattatcacatgtatattttaattaaaatactatagggttttaaaattaaattatgaattatttaagaataagcctatttttatttacttaatgagttaggtagttctaattaggtaaatgtaaatagaagtgaccatcttaatgccctacaatgtaagcagtaattcacaatttgtaaagatttataggaggacaaaatcagtttgatcttgaatatgcttaaattttgcacgcttgtacatttctcccaacttaccaagtggcaccttctagggaaacasgtttcaagaattgtatccttaagtttttaccaactcccccccaaatactgtagtaataagtggctttggcttgaatagtgggatgtccacaagtgttagaatcagctatacctggctttagatcttagctccattaccttttaaccatgtctaagaagaacaaaatgcaaaatattactgatacccttactttggaattattgtcaggattaagtgagatgaaatatgtgtagtaactagarcaatgtcagacattcagatattagtttccttctcttataagcccctatgtagtttttatttctttaggatgacagacatgagttctcccattattttctcattgcctgtgctttattcatattaccatcattatccttcattgcgaagaatccattacatactatagtgaattaacaataaaattcaagatgaatttacacaaaaaggaggatattatttttacacaaataaatattaaggtaatgaaaacagttttgctattgttgacaatcattataaaattgtttaccatgtcttgtaattttaaaagtttagtttttatcatttaaagacaggtattcttattagacacttgacatctgttagtctcaaaatttgctatgttttggatcgcttacaagattagctgagtgtattagtcagggttctccagaggaatggaaccaataagatatatatacaaaagagaatttgttagggagaattgattcatgctattacataggtgaagccccgccataggccatctgcaagctggagaatgatggaagccggtagcatggctctctctaagtccggaagcctcaaaaccgggtaagctgacagtgcagctctctcagtctaaggctaaagacctgaaatcccccaagaggctgctggtacaagtcccacagtccaaaggctgaagaacctggagtctgatgtccaagcacaggtggaggaaaasatgtactgttccagaagagagagaaagtaaaaagaagagcaagcaaactgaatatcccccttctgtctgctttgttttagctgtgctcacagccagttggcatgggcaactgttctagttcctggccactttgttctagaccctgcccactttgagggcaggtcttcctctctcagtacactgactcacaggggtgccttgttatatttcccaggctggtctctaactccaggcctcaactggagttgtcatcttctctggaaacatcctcatagacacacccagaaacaatacttcagcagccatctaaacatccctcaatccagtcaagtttacacctaatattaaccataacactgagggtagtgaacatagttcacataacatagttacaatagcttaggtgctagatatttcaaatacctcattcattcattggcaactacatcatcagccgggcctggggctatgatggtgaagaaatgtatcagttatttattgcagcataacaagttactccaaagtatattgacctaaacctttattatctcatagttttgtggggtaggaattgaggcataggctgttctgtcttggggtatcatgaggttgttatcaagatgtctcctgacgtctttcacattgtatactgtatgtcagagcatcatgtgcatcttgaatatatatataatctttgtcaatattacctcaaagctggggaaaaaagatgtctgctgaatagcagcgtttagtcatttgaaggcttgactggggctggaggaactactttcaagttagctcagtcacgttcctgccaggttgatgctggtttttggcaggaggtctcatttcttccctgtatagatctctccacaggttactcgactgccctcgtgacatggtggttggcttccaccagagcaaacagtctagaggaaggtggaggaagatggagaggaagagaaaaggaaaggagaagggggagtcacagaagctatctaaaaagaatactctcaaaagtcacatagcatcagttctgtcacattctttttatgagaaggaaatcactaagacgggcccatgttcaacagaccgagattagactctgctttttgaagggagagatatcacagaattcatggatatatttaaaaatcaccacaatataacacctttcctttccagatactaagtttcacaggtgacttgagactacagttacgttggtaagtttattattgtctaacactgaattagagttaccaattaagtaccaaaatgcaatgagaaagtgatataaaagcattatgtgcaaaaggcatgccttttttttttttttttacaaaaattctgctaatttggggtatttttgagttggatatcttactgtcttttcagattcagaagatttataatcagactgactaaacacatctccaaaccttctaatttcttgttcgttattgttacatgtttagactgaaatagagagggaaaagatattaccaggtttactgcagtgtggaaaagctgttggagaagaatggggaatgaaaaggaaagagacaagattctttggacaaggcagaaggaagaagttgaaggattcaagttaaaggataaccytgagccgggcattatgrcttctacctgtaatctcaaggacttgggagactgaggcaggaggatcacttgagccctggagttcaagaccagcctggtcaatataacaaggcacccctgtctctataaaagtacrtacatgcatgcatactcatacacataaaagataatgtcagttgatggcatgagtgtgaaagcagagctgtgtgaaacatcactaaggataagataataaggatgtcattattcctagactgtgtagcatgatttttttttaatactttcagttctagggtacatgtgcacaacatgcaggtttgttacatatgtatacatgtgccatgttggtgtgctgcacccattaacttgtcatttacattaggtatatctcctagtgctatccctccctcctgccgccaccccacgatgggccctggtgtgtgatgttccccttcctgtgtccaggtgttctcattgttcarttcccacctatgaatgagaacatgcggtgtttggttttttgtccttgtgatagtttgctgagaatgatggtttccagcttcatctatgtccctgcaaaggacatgaactcatccttttttgtggctgcgtagtattcgatggtgtatatgtgccacattttcttaatccagtctatcattgatggacatttgggttggttccaagtctttgctattgtgaatagtgccgcaataaacawacgtgtgcatgtgtctttatagcagcatgatttataatcctttgggtatatacccagtaatatataccaggtgtatatttggctgggtcaaatggtatttccagttccagatccttgaggaaccaccacactgtcttccacaatggttgaattaggaaacagtgtagctctctactgtagatggttaataaaatatggagaaccattagtgtaatcagagagacttgggttgccagtggctgcttgtacaaccttggtcagttgcttacattctctgtgctttagtttcttaatctgggaaaaaaaatggattgaactaaatcatttccagtgctaacatgttatacctttggaaaggaacttagatatagttgaaacaatttgaatttctctagtttttagtttttatttatttaaattttttctttttaaatcgtgggtacatagtaggtatatatatttatgggatacaggagatattttgacacaggcttacacatcaaggtaaatgtggtatccatcccctcaagcatttatcctttgtgttacaaacaatmcagttatactccttcatatggtttggatctgtgtctccaccaaatctcatgttgaattgtaatcgccagtgttggaggtagggcctggtgggaggcgattggatcatggggagtggtttctcatgaatggtttaataccatcaacttggtaccatcttcatgatagtgagtgagttcttgccagatctggttgtttaaaagtatgtagcacctccctcctctctttctcctactcataacatgtgagatgcctgctcgccctttgccttctgccatgattggaagcctcctgaggcctccccccaaaaaaaagctgctatgcttcctgtacagcctgcagaaccatgagctgattaaacctcttttctttataaattacccagactcggatatttctttatagcaatgcgagaacagactaatgcatgagatattttgatgcaggtatacaatgcataataatcatatcagggtaaatgtattccttcccacaagcatttagatttgtgttacaaacaatccagttatactccttcagttatttttacatgtataattattattgactataacccaccctgatgtgctatcaaatactggattttttttttttaatccgttaaccatcccacgtttccccaatcatccccctacccttcccagcctctggtaaccatccttctgcattctctctccctgagttcagttgttttgttgattttttatattgtttcttttgttttgatttcatttatttctgctctgatctttataatttcttctactaaatttgggtttggtttgctcttgctttcctagttaagatgcatccttgggtggcttatttgagttcttttttgacgtaggcaaaaaagtactgctctttctgtatcccataggttttgctgtgttgtgttttcattatcatttgtttcaagaaagttttcaattttcttcttaatttcttcattgacccactggtcattcaggagcatattgtttaatttccatgtgtttatatagttttaaaaattcctcattattgatttctagttttactstattgtcatcagagaagatacctgatactatttcttttttggtggagaatgttttgagaattgttttgtggccttacatatgttctgttcttgagaatgattcatgtgctgaggagtacacagcgtattctgcagctgttgggtgaaatgttctataaatatctactagatccatttggcctacagtgcggattaagtctgatatttctttgttgattttctgtctggatgatctgttatatcatcttgctaattgacccttttattgttatatagtgaccttcgtttcttacagtttttgtcttgaaatctgttttgtctgattatagctactcctgctgttttttggtttccatttgcatggaatattttttttctatccttttattttcagtctctttgtgtctttataggtgaagtgtgtttcttgtaggcaatggatcattgggtctttttttttttttttttttttgagggcatctcgctctgttcccaggctggmgtgcagtggcgcaatctcagcttactgtaacctctgcctcctgggttcaagtgattctcctacctcagcttcctgagtagctgggattacaggcgcataccaccatacctggctaatttttgtgtttttagtagagtcggggtttcaccatgttggccaggatggtctccatctcttgaccttgtaatccacccacctcggcctcccaaagtgctgggattacaggtgtgagccccggtgcccagcctgtcttgtttttttaatccttgcatccactctgtgtctcttgattggagagtatagtccacttacattcagtgttgttactgataagtaaggatttgctcctgccgttttgttacttgttttctggttgttttgtggtcttctcttccttctttcctgccttcctgccttccttttagtgagggtgattttctctggtggtatgttttaatttcttgcttttagttttttgtgtatctttggtatgtttttagatttgaggttaccatgaggcttgtaaataatataaccattattttaaactgaagacagcttaacactgattgcataaacaagcaaacaaaaaggaaactaataactctaacttggtctctctgctttttaactttttgctgtttttacttatatcttgttgtactgtctatgtcttgaaaagttgctgtagttactctttttgttgttgttgttacagggtattactttgtcacccaggctggagtgcagtggcacaattacagctcactgtggccttgatttcccggtttcaagtgatgcccccacctcagcctcctgagtagctgggaccaaaggtgcacaccaccatgcctggctaacttttatattttttgtagataacgtgatttcatcatgttgtccaggctggtctcatactcctgggctcaagtgatcctctcgcctctacctcctaaagtgttgggattacaggtgtgagccactgtggcccgccatagttattatttttgttgggtttatgtttttatctttctactaaagatatgagtagttacatcacaattagtgttataatattctttgtttttctgtgtacttactattaccagtgagttttgtatcttcacatcatttcttcttgctcattaatacccttttctttcagattgaagaattcctttagcatttgttgtaggacaggtctggtgttgatgaaatccctcagcttttgtttgggagagtctttatttcttcttcatgtttgaaggatattttaaccagatatgcttttctgagtagaagttttttttccttcagcacttcaaatatgtcatgccactctatgctggtctgtgacgtttccactgaaaagactgctgtcagatgtattggagctccattgtatgtgacttgtttgttttctctcactctttttagtatcctttattcttgaactttgggagtttgattattacaagccttgaggtggtcttctttgggttaaatctggttggttttctataaacttcttgtacttgaatatcgacagtctttttctctaggcttgggaagttctttgttattagccctttgaataaactttctacctctacctctctctctttacctcctctttaagggcagtaactcttaggtttgcccttttaaggatattttctagatcttgtgttagaaaattttggtgcagctgagctggcatcaaaaccacaagacaaacttcttcccactcttcccctcccctttccccaggcagaggagtttgtccccattccattaccaacacaggcccacggggagtactgctaggctacctttgatgttcatgccgattttctaggtgtgcttcatttttttttttttttcatttgtctcctctgactgaaaattttcaaatagcctgtcttcaagctcacyaaatcttgcttttgcttgatgaattctattatgagactgatacattcttcagtatgtcagttgcatttttcaactacaggatttctgctggatgctttttaattatttcagtctctttgatgtatctgataggattctgaattccttctgtattatcttgagttcattcaaaacagcaattttaaattcttttgtatgaatcgttgcataactctgcctctccgagattggtctctggtgccttatttagttcatttggtgaggtcatgtttttctggatggtcttagtgcttgtggatgctcattggttttggggcattgaagagtcaagtatttattgtagtctttgcagtctttggttgtttgtaaccgtcatttatgggaaggctttccaggtatttgttggaacttgagtgctgtaatctaagwttgtagtccctgcaactgtatttccattagaggataccctaagcttagtaatgctgtgattcttgcagacctgtagaggtaccatcttggtggtctttgttaagatctggaggaattctctggattacctggcagagactcttgttttcttcctttactttatcccaaacaaatggagcacattctctctgtgctgagctaccctggagctggtggagaggtgacacaagcatccctgtggccgccacccctggaaatgcactggctcagacctaaagccagcgcagcactgagtcttatccagggtcccctgtaaccactgactggctactgcctgtgtttgcttaaggtcctagagctttgccgtcagcagttggcaaaaccaaccaggcttcagggtgatgccttcccttaggtcctgtatgggtccagaartgccatccaagagcgagggcccggaggtggaaaccttagaaatttacctggttctctgtgctactgcacctgagctgccaccgaaaccacaagacaaagtccttcccactcttccttccccttaccccaggcagaggagtctctccctggtccattgtcaccacaggcccacagggagtactgctaggctacctccagtgctcacctaaggccaagggctcttcacttagcttgtggtgaatgctgccacacttgcaattccccccgtagggcagtggtctcccctctgccccaggacagggccagaaatgctgtccaagagccaaggcctacaactggcgaccccaagagcccacttggtgcttttctctattgtggccgggcacaagacaaagtacccttaatctttcttctactttyctcaagcagaaggagtctctcccatagccaccacagctgggaatgttctgggtcatacctaatggtggcacgcctcagagtctcgctcaaggcccacggcatgtactaccttggctactgctgctgatcatttagggcctaagcgctcttaagtcagcaggtgatgaatcctgacaggactgggtgcttctcttcaaggcagtgggctcacttctgacccaggatatgtctagaaatgtcatccagggaattagggcctggaatggggacctcaggactctctctggtgccctatcctcctgtgactgagctggtatccaagttataagtcaaagtcctctttactggtgcctttcctctcctcaagaagaaggaaagggccacttttgttgctgtgagctgtgctgcctggagttgggtaagcatggtgcatacgctcctttagcctccttggctggtgtgtcactaggtcatgtgtccccccaaatgtgctggctctgagcccagcacggcactaggacttgcctaggaattgttgtccttgtggcctagacagcctttcaagttaatttagaactgtgggggtaaagcttgtgaaagttccaggctactggtatgggcagttcccctgtggctagtgctggtctcaatgccttcttcatgggcatcacctgagttctgcccagcattgctttctgctgtgacagggcatcagtgagttccaatgcaaagcccacagttggtgtgctctccgtcccccaagtgcacagattgtctctccgcaccatgcagtctctgctggtggatggggaggtgtattagtctgttttcacactgctgataataacataccggagaccgggtgatttatacaggataaagggttaattggacttacagttccgcatggctgggaagcctcacaatcaatggtggaaggcaaggaggagtaagtcacattttaacttgaatggcagcagacagagagagcttgtgcagggaaactcctcattgtaaacccatcaggtcttatgagacttactcactatcatgagaacagcacgagaaagacctgcccccatgactcaattacctcctaccgggtctctcccacgacatgtgggaattcaaaatgagatttgggtggggacacagccaaaccgtatcaggaggggtgatgtctgcaattcaagaccctctttcttacccttttcagtgcctctttcagcaatatgaagttaaaaccaggtactgtgatcgctcacctgatttttagttcttatgaaggtgcttttttgtgtagatagttgttaaatttggtgttcctgtagggacgacaatcagtggagcttctatttggccatcttgttctgactccctcttatctaggttttaaaaaacaagtttcctccctactttttgattctaatggataattccaagcttctctagtgtgtttaatggtttttttaaaaaggtatttatttatgacagggttttaaaaaaattttttttattaatgaatgaatgacagggtcttgctctgtctcccaggctggagtgcagtggtgtgatcacagcttactgcagcctcagcctcccaggctcaagtgattcttccacctgagcctcctgagtagctgggactaccagcaacacagctaacctttcattaaatggaagccaatagcaaatcagattatacaattagcactaaagttgctatttaatcaatatatattttaagaaatatattcatcaataggttataacttgaaagtgtttattagagaaacaatgtattggtccattttcatgttgctgataaagacatacccaagactgggttatttataaagaaaaagaggtttaatggactcacagttccacgtggctggggaagcctcacaatcatggcagaaggcaaaaggcacgtctatgtggtggcaggcatgagagaaaatgagagccaagtgaaaggggaaaccccttataaaaacatcagatctggtgagacttttacttaccacttattcactaccacgagaacagtatgggggaaactgcccccatgattcaattacctcccaccaggtccctcccacaacatatgggaattatgggagttagcattcaagatgaaatttgggtggggacacagccaaaccatatcaaacacttcccaaaatttacaagcaagaaagagttaaaattggaaatatatctgtgtaaataacaatctgcctatacattgtcttataaattaatttctctttacatagttttgagtattattttaagattgcatcttttccagtgttccttttctcaaaaaatgttttcatgaggaaggagaatgttgtgtgtttaagaagccaatgtatattaaattgagagaaactgagagtcttttacttttactttataggcagtaaagtatttacaaaccatgactgcttatttaaaaccgtaagccaaatttgtattgtagttaatccaaattgatcctgttaagtgaaattggttaaaatctggttttataaactttttaattttataaaataaacaggaaggaattgtgtttatttatttattaatttattcattactctcttgctgatgttctcttcggtctgaaatggacctggctgttcttctaaaacttaacattcttagtgagaacagttataggtgaacaaaatctcctttaatgttttagcttctacctctgtgaaaatgttgtgtgtgttagcttcagtaatacgctatgttttgttttcattttatagtttatatagtgttgattgtgtgccagatactattctgatttcttttatttgtattaacaaatttaattcttacaacaatcctgtgaccaaaagctatccttctctaccaggcatggtggctcacgcctgtaatcccagcaggcagatcatttgaggtcaggagttcaagaccagcctgaccaactttgtgaaatcccgtctctactaaaaatacaaaaaaattagctggatgtggtggcaggggcctatagtcctagctacttttgaggctgaggcaggagaattgcttgaacctggraggcagaggttgcagtgagtggagatcgcaccactgcactccagcctgggcaacagagcaaggctctttgtcaaaaaaaagaacaacaaaaaacaaaaaacaaaaaaaaacccaaaaaaccaaaaaacaactatcctcttgttgacagatggttcttctctggcatcaaggctgatagctgtgtcatggaacatagctgagatccctaagatctggctagcattggtagtttttccccagtggtggacttagagaatagttttctttcaagaaggagacttgtcacacacccactgcagccaccatatgtgaaagtctcctgcccatgggaaagccaggctttacttgagtgattacagtgcctagtgtaaaggtacccatgtagaaagctgggggttgtcatagtcatctttctccccttagtttctcacattcagtcgcaggtactactgttctttcaacagtgtttcactttattagtcccttcttccctgygtccattgaaggagttcaagttgttattatctccaactggatgtgcttaagcagtagcccctgttcttctttcctcttatatattactccactctaattctttgcaagttgtaggcttgaatagcctttttctttcttagtaatgactttattaagatataattcacataccatacacttcattcaaattgaataattcagttggtacatgcacagaggtgtgcaaccatcattctggaaagaaatcctgtattttttaatagcagtcaccccagccctaggcatctgctaatctactttgcctctatagatttgtctgttctgggcatttcatataaaaatagaatcgtcttttagttaacataatgttttaaaggttcactgtacagaaaggttacgtatttggcctgggttcagccaagggcttgtagcacagaacatccctctgattgttcctcggaagctgcgaccttggatttgtgtatagtctggactactagggattattgtggctttagctggactctttgattaatccaccccggcatcccccatctcctrttaagcttttgactagtctgtgtctattggtatcatactcagctgtttgtctccactaattcctaacagtattagtttcctagggctgctgtaacaaattaccataatctgggtggcttaaaacaacagaagttagtgcctcacagttctgagaactggaagtctaaaatcaagtgtctgcagggccattctccttcagaaacctttagggaagaatcttacctaactggtctggtgtttgccagcagccgttggccattccttggcttgtatctgcatcactgcaatctctgcctttgtatttacacagcattttttctcatgtgtctgtgtctttacatggtgttcgcccctatatgtgtatgcccaaattttcctcctcttacaaggatatcagtcatactggtttagggtcgactctgattaacttrcagatttgggaaggggattaggacttcaacttttttgggaggggctggcacaattcagtccataaagagcttgttctttaccagctgtgccacttggatctaccctgcagagcaggacctgtgtgtatacttgtttgtgaagacgatagaaactgatgttgccatccaactcccggcatctagtagggagagtcagagtggcaaaacaggcattgcctggctgccgctactacctacttggtacaggtcttctgtagcatggagctttgggaagcagtatctgctgatgttcaccagctgctaaatctcctaggaatagctcttctactcctgggacctacaggagatgagagctgctactcaactgaccccactagaatagctcttccataacacagagttgtgggggaatgggggtagtctcttatctcgaatgccatggcttcccactattatgactgaatttcgatagattttgttgaatgaatgttttacaatttgttgtaagccctctgatcaatctccagagactgaatcattgtctttgctaatttttgctggtttaataagtgttggagagaagagatttatccaagctctttatactcccattctagaagtctagccccttgaaccgtttttaaaagcaccaccttccagtgtagagattgggatgacatataattcatcaggtaatttatgccgtaagagaatgattcacattagtgtcaatgttatttttcaacatactcaactgctgtaaagttttataatcctttgtcataaaaatagaaattattttaaagtttaatagcctgctttttgtaccataaacaaaacatagaagaaaaacttaagtggttagagaagaatgctaataacctttcattcaatgagtgaaattattcttgaaatatttagtaagttatataaccaaagtcttcctttagctggaagctggaatttttcatagtgaacttaatagtgcatctctttcatgagtatttatttgatgtaaatgtcaccatctgggctgcaaattttctcttattcagttagttgaaagggtcggtaggatacctttaaaactttaaaaaactttaaatacatttagtgcctgcacttaataatttgtatstaagctgagttcaagatgtctaaaactggaagctatgagaaatttctgtttttcctcccagtctaacatactgttttttggacagaatccccatgtgacttgattaatgataaggaataatcacaaagtattttaaaaattattttctgtaaagcttcatagtctatatcttaagatggtaactatctctgtgtatatgttcatttattttaataatgcttttattattttagagatggtttgaaccttatattttgtttagtccaccctcatcattttgatgaagtaattaagtccagagagcatgtaacttcgtaagctttacagtctaaggttacatatataactctaaaggaaagaacaaaaaccataatacttccaaaaatccctgaagcagtgcgtagtattttttcagaaagctttcataaatacagtgtattttctctataatttaatattatcattattttgtctagcattaatttggtatctataataaataattgattttagccttaacttagctgtagagtcctaaggattatrtatttatatattttttctattagacaggcattttcttgtctcctttcacaacatacgtggttcagtaaaacataaaatcacttgtcaatagttagtattaatataaatatataatatcgtgtctatacatttcacttaatttttgaatccatgaattaggaattatctagatttattaggcttaaacaaataattatttgctttgttttgtgctgtactgttgataaagaagctgtctatatgttattatatttgatcctcacaaccaccttatgaaggtaggttggacagcttttattatttctgttttattgatgaagaatcaggtttggtgtttaagtaaattgcctacattttataactttaataatttgctcctatagttacccatttatttttatgttactggttagtcatggtagtacttactgtcttgtttcttctagggaatacaaaagtcttgatttttattctagacratttaagaagaccaatttgggtcatttggcatgaycccagggctagctcaggtgtaagtaatacggggtgagcatcccaaattcgaaaattcaaaacactttgtaattcacaactttttcagcaccaacataacactgaaaggaaatgctcattcaattctcaattggatttttggattttggatgcccactaggtaggtataatgcacatatttcaaaatctgaaaaaataaaatatccaaaacacttctggggttaagcatttcagataagggctattcaacttgtgtaagttaaacttctctgaatgccaggattcctttttttcccttttagcaaactcctgtccttattttagttttagttcaatgtcaccttctctgtgaaggctgccgtttttcacaggatgcagaaatctcttattcccctgtgctttctcatagcacttttgtacttgcctcacttggtacaagtattatttgttcatgccatgattgattattgagctccttgaagacaaaagttgtgatatacctcttcacttctccatggccttgaattaaccataatggagctcagtaaatgtttttaaagtaaatgaatgaacaaatggtacatgcttgatgtgtgtctgtaaactgtataagccaaacattgtgtactccctgtttctggaataactgtgcaatgctaaacatttctttgactacttactatatgatgtctgctggtttttgctgcataaatattctgatatcttcagttggtgcttagccagtttattcctgttccactgcatcacttatgattatttgggacctggatgaagcagtttcattgtaatgttgtattagtygaatctgtgattttataaaatacraattaaatttcttataaaatgaagtttgtcactcatatttgtctaaatttgtttaaaaataaaaatcctagctaaactcttgcctatcccagaaatgaatttaaggaccgtattccttatgaattatgaagggaatttaaaagggaagcatccaggaaggtgtaattagtgtctggtaaactggctcttgtgttttctctgcctttcctctctttcttttaccagctacctgtagaccatttccctgtttattagctgcagtaccagaaggtggaataggaaatgaagtttacatccttcagttttgttatttgttagctgatttcttaaattttaggtgtgaagaactataaaaaagttaggttgtttgtgctgcatccttattattttttgtatcctgttatcacaggcattgatgacttatgtataattgagtaaagctgcaggaaagaaaagcacttaggaaatgcctcttcagattttcaagatcttttcacacctctcttggagaaaagaatttaaaaaaaaaaaacctaaatggattctaattattttctttatctgtggtattttgttttgttaaatagtgtgttatataatgaatagtggaattgggttcagttgtgaattacaggaagtgacacatatgataaagattgtggttttatgtctgttcaacaaaccacagtggaactgaaatgaaactataaatattttaactacaccaattgctttctgccgccaagcaggactagtcctaatgaaaactagataagctgatacaaagttgttgagaagcagtacagaatataggtccttatgtaccatcaggaaactttagcagttttgaatcttctaggcacacattacttttgatcagtaagaaacaattattaggttattttactcttttaagaattgaagtagccacaataaagctattgtgtgtttttttttcctttgggacaaggatttagatttaataataaaatgtgttttgtatagtaaatattcatgaaacaattgaaaagcaaataaaaacattcaatttgtgtactcttttcacaatttacatactaatctgaggctgggctggaggagaaatatattcccacattattcacttaccaggagtataccatactttcagaagctttttcttgactagtgatgactcttaagattttactgttaggatttgaacacttgtaggtcctttagtatacagaaaacattagatatatttaatgggatagcwtaagtaatttccattctcattcttttcttgagttttaaagtctaaacccatagacttacacacttagtctttgtccactagtcagaatgtttacactttgctaagtagttatgaacgtcctctccggtgtatttgtttcatttttcaccatgtgaggcttgactgcttagtttgtgtgagagaatgtgctactgtgagaaatataatagtgaatatctaacccctccgtatcactgaccttcggtctagtagaggagagaccattataaaaataactagggagcccttatatcctaacttctcttatcctggcaaaattatcaatatcaccctttttcactttccagtgttgtggtttgggtgatgagtgatatagtcacactgtgagtaatgaggggaaagaacaaatatttttaacctgatactttttctgaattcatgtttaggtggtagaggataccatttgattcttggagactcccaaatataattttctgtctcattttgacttcttgtagatacatgctttgtaatcttttatttttatttatttatttttgaggtggagtcttgctttctcgcccaggctggagtgcagtggcgcgatcttggctcactgcaacctccacccctggggttcaagtgattctcttgcctcagcctcccgagtagctgggattacaggcgcctgccaccaagcctggctaattttgtatttttagtggaaacggtgtttcaccattttggccaggctgttctcgagctactgacttcaggtgatctgcctgccttggcctcccaaagtgctgggattataggcttgagccaccgtgcctggccatctgtaatcttttaaaaaggaagagaagggtaccaattatctggcttttcaagatttttccaaacattttttgaaaaatttctgagtttttggaattaaccctttgagcagctgctgagatttttatgttcttaaattggttagattaaaagaaacatttaagatgtgtctgtcccttgcctttttctaaataatttatgattaatgtcacatatcctatacaaaaaaaagtatgaggttgtatgtagttttgacttgagattttccagaagtcttttaatggcacataaaggttttttgtttgtttgtttttgttttatactttaagttcttgggtacatgtgcacaacgtgcaggtttgttatatatgtgtacatgtcccatgttggtgcgctgcacccattaactcgtcatttacattaggtatatctcctaatgctgtccctccccactccccccaccccaccacaggccctggtgtgggatgttccccaccctgtgtccaagtgttcttattgttcaattcctacctatgagtgagaacatgcgatgtttggttttctgtccttgcgatagtttgctgagaatgatggtttccagcttcatccatgtccctgcaaaggacatgaactcatccttttttatggctgcatggtattccgtggtgtttatgtgccacattttcttaatccagtctgtcattgttggacatttgggttgattccaagtctttgctattgtgaatagtgctgcaataaacatacatgtgcatatgtctttatagcagcatgatttataatcctttggatatatacccagtaatggaatggctgggtcaaatagtacttctagttctaggtccttgaggaatcaccacactgtcttccacaatggttgaactagtttacaktcccaccaacagtgtaaaagtgttcctatttctccacatcctctccagcacctgttgtttcctgactttttaatgatcgccattctaactggtgtgagatgatatctcattgtggttttgatttgcatttctctgatggtaatggcacataaagtttaatctgcaatacggaatctgatataccacccctttcctctcaccatcatctactctattttactaacatgaaactccttaagcagccttttaactaggagaaatacttgtatcaaccaatacagaaagattatttattgttcttataggcaggtttgtttgtggctgcagttagtattagactgtcacttgggatgttattctggaattgctttttctaattctttcagtgaaggtatgtgactcgttctcttttttccttttgcaaagcaaaggctcgacaaaattttatagactggtgaaacattttgcaggtctgaaaaaagtgttgtaaacctgctcatgaggttcagacaaaacttctgtgcataaattaggagttggtgttgtctaggagtttgtgaagattaartttttcagggttctgatttcatgaaatgtcattctagatttctgtcaatctcaattataggatgatagaagtatgctgatttctcgcttaataattatgtagtatttgcaataagtatacaataagaacttatgtacttattgtacatattatatgcagtatacaataagtatacttatgttgtcttattaccataaacagagcagtggtcatgatatataaatactgaggaaatcaaatgttttctttttttgtgatctaatatgaaaatcaatgcaacatttctggataatttgcgacaataaaaaagaaaagaaatatgaggcatgcagtaatcttgacaagcaaatttcctaatttgcaaaataaaaaattacattagataatctctaaaaagaaccttctatctctgtgtcatctttgaatctataaaatacagttggtccctgacttacaatggttagatttaaatttttttgactttatgatggtgcaaaagtgataaacattcagtagaaaatgtacttcagtgtggtattcagtgagttacaggaaatgttcaacattttatttaaaataagctttgtgttagattgtgccatattttgcccaactgtaggctaatgtaagtattcaagcatgtttaagataggctagggtaaagctatgatgttttagtaggttaggtatataaatgcatttttgactttggatattttcagtttatgatggctttattgggatgtaacaccattgtaagtttagtcacatctgtagattcatttagctaaaatgccgtaatctctctctctcttttttttttttttgttttgagacggagtctcgctctgtcgcccacgctaagtgcagtggcgcgatcttgactcattgcaacctctgcctcctagattcaagcgattctcctgcctcagcctcctgagtagctgggattacaggtgcccgccaccatgcccggctgatttttatattttttgtagagacggggtttcaccatgttggccaagctggtctcgaacgcctgacctcaaatgatccgcccacctcggtctcccaaattgctgggattacaggcatgagccatcgtgcccggcctaaaatgccttaatctcgataggctttttgcacatgcactatttaaattgagtacaatactcaatacttacgcccttgcccccttctccctggatcttatttgctaaagtagacattgatttctcttgaaaatgtaacaaaatttttgttgaacattttagtgtttagtgaaaagatgagaattctcagacatgaattttttatttgataataggaaactgtagttataggggaaagtcagtattttgaaaaggcaaaccaaataggcaaatatttatggagtttctaacacaagcaaggctccctctgtcagaatggacatcaggaaatgtccactgagtgaacattcaataaattttatcagttgctgtgggggataaaattatatataattttcgctttatagtttgttttgaatgttctggaaacagttaaaagtaaatgagtgtttatattttgccaaagtatcaagacagaatagtaggcagacagttggtatttaggcaggcaaaagggcagattctctgccaaatggttgtaaatgaattgacgcaaggaatttaaatattaagctttgatgagagattgttaaattttctcaatattattgtttccattggtatgcaagctaattagatacaacaactaattggagccggtggctcagactggcttgccaccattggcacacacactggatggcggcacagttgttctgattgttggctaggaagtcttccatcaaggcttagctgtagtcttatctgcaaattcctcctggtcttctctggagaacgttgccgtacatgggtctttggaaacaaggaatttcccaggaaatccccaccatctttactgtctgtgatattaatacaatttgtactctgcccttttaaaatattttagtgatcttaaaacttgaccactctggaagaatggagaagttctgtatttggcaagaataaaaagtattacaaagcatcctgcttctgcrttaagtggtagtttacaacaaagctgctgatcttaattgtgcatttaaaaaaacaggaatcttgttaaaaatttttatttctgtgatgctaccccatacattttagtacagtaggcatgggataaaagaaacactcgagaagctagcctttcctcagctttcctagaatggagactgcctcctaaaataytcagaagtcagaaattattttaaaactaaagtgttaatgagcaaatttaaataaagttggtctgtaaatatgtacttcagagctgaacttagtacyctcttttcacagctctaaatgtaatactttcaattacatgaactcattagtctctattagcatacttccaggctttagaaataaagactttgaaagagctcttctcttattttattgtatggaagtaaacattgaaaaataaagaatccttacaaaagtaaacttartctacgttgctggcagaatacatttattctataggaggtaggtgacagctgtttttaaaactttgacacataagtacaagaaagattagaatcctgtggtccacattatatattgaatagtacacgaattacaaggaggaatgatttgggtgtcccctaattgagtcacttgaatttggataaggcagagtgctttccctggaggtgtatggagagaattcacatgaccccttcattgtccagcagctttatgcatcaagattggactagaaaaaatgtgggatgaatgaatttaggattctaaaatgctccagacttttcagttctttttgtttgcatagttgcattctaagaacagatcgaattactatcctaggctcagaaaacacatttgaggttagttttgtccaaagagcatatttagtcttccttaataaaagtatataagaaaggatttattgttattaaaaaagattagaatgaaactgttaagctacttaattttttctaattatcttttatgattctgtaatacctaggtagtttatgcatataattaatatattagttgactattcttgcttttttcttttttaaaaaaattaatgtttgcatggaatatctttttctcttcattttctttcaacctatttatgtattactttggattttaaaagtaaatcaaagcgaagttcacatcttaaatgttctcatgaagttcttttgaattttttccattagtgtcagaatacatgtttgggtaagtggcacaaacacttttaaaatgtagaaaatggaatattggtacaaagcagagtagaaacagcttgattcaataagtcagtctttaagtcattaaacagatatttgttcagtacctgataggtgccaggtttaggtgcattgtttaggtgccagagagatagtaatgaaccaaacaaagaaaacaaagtactgccaacctggagtttacattgtagtggaggaagaagaaaatgaacaaataaactatatcatatgtcaaaatgtaataaatactttggagcaaagtcaagctgggaagagagcagagagatagctgtcaatggatgggggcagggaggggggtaaggtggtgatttcagatagggtgatcagagaagacctctctgacaaagtgacacaaagaccataagatggtgaggaggggacaaggtgtgctaatttgtctggtagaagagtgtctgaggtagaaaagggcatgctgacatgttagagggaccagtgggagattagwgtgactggagaggagtgagccatggaaagagtgggaggagatgagagagaggaagtaggggattgagccatgatgaatcccgtaggatatggtaaagactttggtttatgtgagatgagaaatcactaagggttttgaacagagtagtcacatgatttagcttacatttctaaaggaacatttggtcatttgtgtatacttgtctagttgcttagtaaatgacagcagaaagacaagaatttaatgcaactaattttaaaattttttttaaaagatgaagttggactggataattttgcatggcctttttacttctaaagtcctatgcttctttaccttaatacggatctgaaataattgatttaaaaaattttaaagtatgtaaaggaatattgtggaataatttgtattaatgctattgctgtatattttgtatattcagtgctttattatttatatctttccacttttttttctttttgagatggggtttcggtcgcccaggcaagagtacagagtggcatgatgtcggatcgctgcagcctcgacctcctgggcatcgatcctcctacctcatcctcctgagtagctgggactacaagtgctgtgccattatgcctggctratttttgtatttttagtagagatggggcttcatgatgttgcccaggatggtcttgaactcctgggctcaagcagtccacctgcctcaacccccacaagcatgagccattgtacctgggcatcttgccacttctgaaaaacaaatgcatacatggcaattattaaaataaagataaatcactggggaaaaacatttaaaagcatgtgactttaaaatttaaaaactgtatgtaataagattttgaagaaagaaaagttaataggatttatgtaacraaagaaaataattgtgacagaaaactgggctaaggaaattggtgcatttgaacacaaattttagctttgagcttcctggcagccagtggggtgtgtgtgtgtgtgtgtgtgtgtgtgtgtgtgtgtgtgtgtgygcagctatggatatctctctaggaaatttatcaggtgatgtttttgtttgagaaaaggagtagtatttagttacctgggaaatcacttctagatgccaaccaaatgtgtgtcactaagacttgaaatcattttgataatttaaaagaaacccagcactttataagactcccttgacacttctaaaaagtgatgacaggtgtgcatggctgttagccctggaaaatacagctatacgtttcgttttacaggtgataaaagcctctattttgaagcagagatttgtgaaaattactaggaaaagtatgacattggtgatgtattactctccctcatctgcaggtcccactgntatctctatattggttctgttctttaatagatcataatttcagccttaatctgaaatacctaatgccctgcaaggctctctgagactagtggttttcaaactgtgttccaggggatcatggaggcatgtcaaatgcagagagtcctgagcttctagagctttgaagaaagggttctttttcaatttaaatgtttcttaaatttcatacccagtgttcatcaaatatgatatttatctatgtctctttcgaaggctataaaagactgagagaataagttataggacatttcagtgactagccttggttatttttttctttaagagaaacagagttattaggactaaaagacattttgatgtttcatatcagcagtagggagggagaacctcagggacaggttttcctccccaactccccctaaaccttttgtactcctaggagacagattttctgccacaaaattgcctgccatgcctatttgactcagtttttttcacctgcaagagaaaaaattaagaccctacaaagctttcctagccttcatttgtttccattacaagagaatgatgaatgacagtgttaaaataatttgacagtatttataatcttgtgtattattgttagtaatagtaggagcagtagtatctcgtagtagttcgcagtgtagaaaatatttgcttctgagtattaaaggacatgaatatatctgagagatatatctgatatatgtctgaatgtatttatgagagatatattagtcatcacctccacataacatgaataaatcaagctttgtaaaggttaggtaactagcctaagataacagactagtaaatactagaatctgatactcaagttcagatcatagaacttaagatctcatgttctttcaattgtattattgttaaattaaaagtttcagttgttgatgcattttgtcctcacagaaagatcaacattaatttgattctttgtattatttagaaaagaagcagtttctatccttactcaaaacttatcttaaattgaaatatgcactctcatatctagtaacaagacatattttattaggttggtgcaaaagtaattgtggtttttgccattaaaagtaatggcaaaacctcgtagtaataaaatagtctgtactgatttttcttttaaaaagagatttaaaggtttcctcatctactttattctagtaaaacttactagtactttggggatgatttattgtattttttttttgagattatgagaagactttcaagaaatctctttgtctttgtcttctaagccctcgagatctctttctccatcactattgatggggcacagccgttggtgtgtaaacgtcctacaactgcgtattggtggtacctactcataggaaaagattttagtgtacaaaaagaggctagtatatttatatttcaccattttttaatgaccagaaattccaaaataaaacatagtaagtgaagaaattataactataatttcgaagtttattttaaataatctagaatgacttttggataaaaaggtatgttttgaataagaatgcaaacaagaaaataatagcaaacattcagtaagctgtactagcatattttggtactgatgaaagatcaactgtattatgtttttccttttgctaaggtgatgcttttcatgcctccagggcagaccttctaatgtatttttctgggcaggagcacattcagccacaggctttggaaaaaggcagttagctatatgattcagattgatcttatattgatcagctattgatatgtgaattatccagaatagctgtctgttctgtttgaaattcagctattttttttcttggtctataaagatctttacatttatgatgcaattgaaatttccattttgtgaaaatttgagagaaaggaaacttttgagccttaaaagctctggcagatatcacattaaatatgcacataaatgagtaccattcctaaataaaatgatttattttccagttgtatagatttccaggcatcttaattcttcttttgctgtgctttcaaatgggttattttgtgggtctcaaatatatttccttaaatatttggtgaatccttggagttagaagagaaaggamtattaccatcattttattagtgctggtcaattctgatgggggtaaaaattaaagaagctgatatggtaaagacgaagaaaaaataaaaatatggggagactgaccctggctttcattggcgtagttcatttctgcccttcctttctatagatttaaataaagacaagtatttattttgactaaatcacagacatataaggcattttcgggggtagattgcggaggtagtaaaataaactatagtatttcttggatttgcttatttcttgtagcagtgtctatattaatgcatcttgaattttatgcagtgtaattactgtttagtgaaatttaaaaaaggttttttaagagacatggtcttactctgtcactcaagctgttgtgcagtggcactatcatggctcactcactgcagctggggactcctgggctcaagtgatcmtcccacctcagcctcctgagtagctgggactacaggcatatgccacctcacctggctaattttaaaatttttgtagagatggggtctcactgtgttgttcaggctggtcttgaactcctgtgctcaagagattctcccactttggcctcccaaagtgctgggattacaggtgtgagccaccacgtccagccttaatgaataatttttttaaattgaaaagtcacaaaacttactacgaacaaggtaaaaggtgtacagtttgacttagctctttgctcaaaaatactgataacataataagtagggtaagcctccccagtgcctcaaaataccagataccgtgttcatcattctctcagacatgagtgattaaagtaagattatttcatttttttatgatacctgctgtgctcttgaagaagactgtcttattttcacttactagtaaaagtgaaagaggaacattgttttaacattttaaaaataaaaattattttttaattattgttgatttgaaataatcagtttcctaatatgttggttcaggtttcctgagatgcaaggaaataataattgtaccagaatggggggaaaaggagggaagaaaaaggggaagagaggagaaaccagttgcaatgaattatagtccttatcatgttactttctgagaaataaaatgggcttctgattctaaaaaatatactgtatctgcaagagtaaaagtcgtaatctttcccatatttcctataggcaaattaagttactttagtggcaaagtacatttaaaggcccatttatttcttcaatcacatgatagtaaaagttttgtcaggaggtctgctgaactgagaatacagaatcagtggcagtgacagaacatctaaaaatttccaatcaccatctcctttagacatactggtccttgcattagtccttaagccaacataaatgatctttaatgtaaaattgtaacaagtacataaagcaggctaacgtagatattgcgtatctcaaagcagttggatttaaaataagtgatagttaacgaaatccaatactgtaatgaacttttgagaaaaaaatagttgattatgctttttaattgtgtgtttggggttttggcttttattattactgttaatttggccataagctcattatgttaatcagttttaacagtgtttctccatttgctggataagaatttggctgattggccgggtgcggtgttgcatgcctgtaatcccagcactttgggagactgaggcgggtggatcagttcagctcaggagtttgagaccagtctgggcaacatgatgaaaccccatctctacaaaaaatagaaaaattagccagtgtgttggcacatgcctgttgtcccagctacttgggagtcttgaggtgagaggatcacttgagcctgggaagcagagattgcagtgagccgagatcatgctactgcactccagcctgggcaacagagtgagagcctgtctcaaaaaaaaaaaaaaaaaattcagctgattactactttatagttatattttcagcattagctaggcaatataatgcagcagaaaggatccagaagtcttcacatccataaaaattatagaaagtgtagtttctatgtattgctggtagttgtcagtcactatatctagctaattttcgataatatcttttggttcatttattcatttaggcattcattcagtactaattcggccctstttctgtgctgtaccctgtgtcgagcactgggatgtaacagtgtgcaatacaaagtccttgtccttaaggaattgataatctagctgggaaggcctacttsatgaattacagatgagtttagcacaaattgtcattgagagatgctgtgtgctttaggacgatttcacataggagtctaacccagactgggagttcagggacaactttactgaggaataatatttaagtgaagacttgaatgatatataagagttagcaggactaaggcggggatgtagggagaaggagtacttatagtttagtgggaacagtatgtgcaagaactggagtaygaaagaagaattcaaaaaggttaatataggtggaatgtagagaatattgagtgacttgaagctataaagattggtaggagttagatcatgcagtgtattttaggctacgctgaggattttagactttatctgacatatagagaaagccatcaaaatgagtgaaagtagagtgattagtttgtctatttaaaggctaagcccctggagattggagggaagcaaaattggatgtggggagatgaccaaaggctgtggcggcaacttgactgaaagatgtggtaccttgagggagaaaagtgggcagtctgagagctacctgggaagtataataaacaagacttgcaaaccatgagaaaagattacttaagatttcttcctggtgttgctatcaccaagatgggtaaaactggaagtatttgttggtacacttccagtggttgtatttgtgtgggtgggcatgtcatttgtgcattttatgatcaaaatgtgcagtctaactggctcattaaaaacttgacaaaatttaggtgagttagcaattctgaaacaactttatgtgtagtttaagattaagcaactaaatatgtggtggatattaagagttaatttttttaacatcagaaaaaaagagctagaaataaggtaaaggggaatctataatgaaccttggattagaatttgagatatcagtatgaatgaatggagataaagagaaggttgcatatatgtgtatgtatacatgtatgccttatatatttcttacttctgttcatgagagggcctagaagcagtgacatcatagctccagtcaatacacccagtaccagatcttgggtttaagtgccaggcaccaataaaaggaaccagagttscttggaaaaactgaattggggactgggactgggactggggaagtacaggatgaaagtggcaaaatgttcaaaaaatgatgggagcatgtcaaaagaatgtatgagccaactctaaggagctctcagtggccaaattagggacactttgagcactataataatgggccataacccataaaataaaaagwrgtatccagatataattaagtaaattcaaasgggagaaaggaacacactttcttgccatrgaattccaattagtaaatgaagagtcattgatataggaaattaccatttgaaaagaaacactacagtaataattgttttaggtgagaacagttagtggacaatgtaagatggttataaacaggatatttacagtcacaaaaagatctcactaaaagatatttactataattataaaggaatcatagtaaccttacagtggagaaaatggacatcttcttaaccaactaatcaaagtagacatactaataatgagacatggatatcatgcattttctgatatgatgtactgagaacgacacaacattacttttgtggtattcttgacaaaatgcatatcctgaatttaatcatagaaaacatcaaacccaaattgagggccatgctacaaattattgactagatttttagaaagtgtcaagattatgaaatatgaactaagcaactgtgccagattaaaggaaaccaaagagatctgataactaaatgcagtgtggtatttggatcaaacactggactagaaggaagatattagtaggacaattaacaaaatttgaataaggtttatagatcagttaatagaataatatcagtattagtttcctgatttagataattgtactgtggttatataagatgttaatgtttggggaagctgggtgaaagggatatgggaattctttgtgtaatgctttgtaaagtctgaaattatttcaagattaagaattaaaaaattacaaaaacttagagaccctagttaaatgttttctttaatttaatgaagggaagaggagatgatatggtggggttggttttattaaatttgactttataattatgttatgtttaaattttgattcctgagtatttacttcacttgaggatttttttttaaatcttcccattctcttaaacattgtcttgggaacagatgtatttttattgtgttagcaagatgtgtctttaaaatattttcttgaaatacagtaattgcacttctagaaatggattcattttaacctgatttaaaataatcaaagtagtcagagtgattaattttatgtttgttttagtttatttttaattgtcaggaataacgggaaatactgaaatatttagagaaaaagagttaggatgaaaagagggaaaacatttaaagtctttaaatatttggataatactgtgaattttcagttgttaactcccatttaatacatggataagctgaagcctagaagcttaactgttttgccaggacctacgtagttaacctatattggaggtgacattttaacctgtgtctgtatgtcaggctccagattttcccacaatactgtaatgaataaaagatgtatatattctactgaattgtaaagagccattactctttaaaattttttctttttgcctgtttgataatcatgttttcagaatgcacagtttttaacatttatttacattaaatttttagctaaaatacagagtatttataaattggttatggaaaagtgaggaaaaataatttgcatctactatgcactatatttttttcttcttgtgaagcaagtgcctgtcatgctctggaaaatataaatatgaaatctgaacagttgatgattataaaaataattacaggttgccattatgaagcacacagtcacacctaatcctttaaataaatgtgcttaactacactaaaatacatgttttaaaatgttaaacagagacattctaaaaagacacgtgaaaaccatttaatttttttaaagaaaaagatgctgagtgggtccatagtgggaattattttaaaacaagaaaaaagaaatctttagccctggaaacccttcttggactgcattagaaataaatttcctgatgtagcctgtaagtcagtcaaaacagggaagactgaatgctgggagcaataggtgtgtttgttaactctgaaatactgaaagtcagaaacatgtgaaaaggatggtcatgttaagtaggatctttaaagtcggtatataaaccatttctttgccttctattcaagcaatatactttcatccttctgttgtgtttcctcaattcctacactttgttttcgtactccccccaccaggaatgaggcaccaacaccagtgggagagttttagattccttagaaattctgcttatataagtgagtacatcaaatgatctttgccacaaaaatgatgaatgtttcttttgaaatgcagaccatggttccaagaagtttatgctcacagaatcaggagccttgcattgaaaaggtgtaagtcttgctaatagcctaaaaktctatttttttcacccaactgcagcattaaatattggaggtaagactacagacctaaagagcagactgggaagcaacaaattatcttattggtggtgatgttccttatagtaacaatgatgaacttttatagagcacttcctgtatgccagacaggaacccattaactcatttaatctttacagtygtttaagtactcatcttatccacattgtgtggatgaagaaactgaagtataattagataaatttacccaaagccacactattgagattctacttgagggcattgtaggtctcattttggacatatgaactctggtagttataaatacagtatatgtttttctagttgtgtcttcacctagaatcttcaagaccacaagctaaaggtttgagtgtaggtaagcttaggtttagggtctgcatttgagcatcttatccagctgacagctgtgaacagaaattaaaggtagcattttaaaactgtgtctcccacagctactcttatctgcataaactgtattctaaagcataatcatttcccctcttttctttcacttccttcttctcgttcttttttttttctaaaaatactttagtaattttaatagtgtagtaattgatcaaactatttgcttgcaaaagtatctggccaattttttctttgtgaaaagtaaacagcagtcagctagctgtgtatcagtttatcttagttctgaaaaggaatcaatgagaagatgtaaacaattatgacaaaaccaagacccaaaccacaaaagacttcaaagattaagtaattatgtatacatagttccatataacaaaactaataattgatagtagggaagtaaaagagaacaaacatttgttgatttcttgcccaagcattaggtgtttacaaaatgtattgtttacagtggagactttgaaatttcaaattcatttaggttagttggaggagggaggaaagctattgacagaaacactatttatttctgtctagctaaaaagaggatttaagcattatggggggtactttgatttagtttagtttttttttttttttgagacagggtcttgttttgttgcccaggctggagtgcagtggcacaatcatggctcactgcagcctcaagcccctgggcccaagtgatcctcccacctcagcctaccaaatagctgggactctaggcacacagtaccatccatcaaatcttttgtggagatggagtttctccatgttgcccaggaccttagcttatttgattgcatagtttatttagcacaggaggggatatgataggagagctcttccttccgcagataaaaatgttctcttccgtgcttataaacatttcactttagtctctatgagattgtgtgaatttttctgtggtcgtaggctacattttcacactacataaactatgcccctggttatagaatgcacatgcattctgcagtacaccaatgtatttgtttgtagttggctttattatttattcgtatgtgtatatttaaacattcctgacttggttcctgacaccaagaatacatacatgtatattttcttggaaatactatggaatataaatgagtattagcatcaccctgcgttgatcaggtgaatttgatagaaatgggaggggaaattttcttaataagtcctaaacccaagaataaacttttatatttttttttctgcttcatagctgtggaaaattattgcaaccaaactattgaaaccattcttaaagttaaaagaattgttattttaggacaaattttgaagataatacttttttgggggtggggaacttctgctgttattgttgctgtgctggaggaatggtgcttattcttttggtagcataactagtggtctgacatgaaaaactcttaaaacttaccctatattgggtctttaactgctattttatgttaaaaccttacatattagtatgwatatatatatgtgaatgcatacatatacaaactacattttcttatttttaaaatatcttaaggtacatgaaggagttaacatgttcatgaaacattgtgacatggaaakgtacttaggacttagtctaaaatggaaaaaaaaaagcaagacgcaagactgaatatgtagtatattcaatttaaaaamtttctggccaggagcagtggctcacgckygtaatcccagtactttgggaggctgaggcaggtggatcacctgaggtgaggagttcaacaccagcctggccaacatgatgaagccacatctctattaaaaatacaaaaattagctgggtgtcrtggcactcacctgtagtcccatctactcaggaggctgaggcaggagaatcgcttgaacctggggaacagaggttgcagtgagccgagatggcgccactacactctagccggggcgacagagactccatctaaaaaaagaaaaaaagttctgaagtgaacatgtgtattacttttaaagtaaacttttgtgaagtatgtggcatgctcctcaagtgaacacatctgtgtaatcggtgccagatttaaaaaaagaacattgccagccctcctttccaaggagacctcgtgcctccttcacttagccactgtctggacttctcacaccattgataagttttgactgttttgggactgtacataagtggaattatacagtactactttcctatgtctggtttcttctgcacaatattgtttgagattcgtacatattttatgtagttgtagtttattcttattgctgtgtaatattccattgtgtgattatatcataattcattctatgtttatgggtagttctcagtttggacttaaatcatttgttacttttatcattcaaaatggattttaaaaaccagaaatatcaactaaatctagttttcaagtgaactctctttaaatttgcagatgtactgtgctaattattctgcaaattagctactttgatttgattttttttcagtcctgatttatcaggagtttacagatttggggatgtctaatcatgttattgattatgttcaacctgtttttcttcaagcatgagtactttgatttatctggttaagaaattttcagtccttcatactgaggtctcagtcatcttacaatagagacagccagtttactccccactttctagcctccgactcttgaaagcttccaagaaacacatccagaggtcacatattgggcaaccgaaggctcatgtgaaaaagccttagarccacaaaaaccttgcgcctcagtcattaatgtaatttggggcagattttatgaagcaaactaamgcctttgaatttttttttttcagttttaacgtgagtataattacttccactcctttttccactttccagtctctccgagttgcgtccctaaaggatcctgctgcaagaaatgagtgaatgaatgaagatattaagaattaaagtactgatgttaatgagagcatgggtgatgtggtttggattgcttgaggccaggagattgaaactagcctgggcaacatagtgagacaaaccttgtttcaaaaaaaataatatatatatatacacatacacacactaagtgaggtggtgtgtgcttgtagtcctagctgcttggaaggctgagatgggaggattgtgcccaggtgacagagcgagacccagtctgtattaaaaaaaaaaaaattaaatgttgtatacttagcacataagtgatcattaaatgtttgatgaatgaattaatgaggaaagattttttttttgaaaaagaagttttatgaggagagaaaacattgcatatgtaaggcattatcctcaattccattgtggactctcccccaggtgtgcagccttgaatgatggaaatatcctcatgagattctgaaagaggaggaaacgaattttgcccttaaataggtgtcagtacagckgcacttatttgcacatttctagttctgcctctgactagagatcaattgtgatgactttgaatttgtagaccatctgcctgtcagtgcacttaaaattgcaactgatctttataagctgagtataactattattgtagcaaacagcaaattaagtgactatacactggaaagagttaggttcatacctccttgaagactgtgagctgttctttatttggacacctggtattaaactcttattggttattaatatttgggacaggttaatgaagacaatattttacagaatatagcagttttcaatataayagattcaatacaacaactttttgtgtgtttataattttgttacttattatttaccataagtggtttaaaatatacrtggcaaaacattctttagagctttgattgcaataattatcacataaccaacacctcytaagtattacgtacttaagaaggaacttgaactttatcttaacacaatagcattgacaaattactcacaaaattagtagttgtggaagaaaataggtataggaagagtaagtcactgatattgagtaaattaaagttatagacattaaattacagacaataaaattatagaagcactaaatagataaattgatttttttaatgtcatgttaagcatttaaattgcctttacaaaatattcttcacagtccttggagaaattgctgctgtatatttgattaatatgtgaacaacatttttattgttaaaatattttcttcattcctttcaaatttgtatttaaggttagcagagcctcaagcagtgcctgagtaggaaagtgataaactgacaccacactgtagaggaggaagaaaaacatctcaccaacggcagacagcagaaactaatggttttcaactgttgctgatctaatcaatcatggtgctatratataatcagttctgtgtgattcgtttgttgttctactggaatgcattgtattcccttcttatttttaagcccccctacttctagttttcgcctttcttaaaaggcaatttctaasattgtgtttcttttaaagccaataagtaattgtgaaagacaaactcagagcctgttgaatttcaacaaaagttaagtattttgtaggacatacaacaatagtgttctttaattaaaatactgagccatatgaaaatttgtccaacatttggtaaatgcccttagttgaatcgttaatatcctagatagtaaaagattagtaccttttatctctagtctactgggtacagattttgctttcagatactatcatcacatcatcacacacaggttgaagatgacattttctcacctgttaaggcatgactttcagtaaaatgtatttagctgtcagaggtctgcaagcagtccatcagttgagacatgatgctgttttgaccgatattggtgacattttaaaagctacacaaaaattcataattataaaagtgttcactgtttcactaaagactgtgtaatgcattgcatattaattaataagatgttctcttttaaatgctatccctaaaatgtacttaatgttactttccattaccatgcataaagttttaaccatttattcatgccattagaaaaatgtagacttttcctttcttttcggtatgttccttttacttttctactcattatagagtcatgaacaactatggaaaaacacactttgttgattcyttgtgatgtttttgaaaacttcgttcatatatgaaaacttctaattcaccttgctttctgaaggagaagactaagttacatatgagccctgttttgagtaatgtattactattagtattacagtatgaaagatctataatcagaagcccctttcccttgaagtggaattattctctatggccattagtacttagggtgatatactatcttcagtgctatcctgtgcctttccatttttgtcatgttacttccctctctttacatccctgcccacctccactttctgctgttaagaatagtccatagggactgtaaactagttcaaccattgtggaagacagtgtggcgatttctcaaggatctagaactagaaatacatttgacccagccatcccattactgggtgtatacccaaaggattataaatcatgctgctacaaagacacatgcacacatatgtttattgtggcactattcgcagtagcagagacttggaaccaacccaaatgtccatcaataatagactgaattaagaaaatgtggcacatatacaccacggaatactatgcagccataaaaaaggatgagttcatgtcctttgcagggacatggatgaagctggaaaccctcattctaagcaaactatcacaaggagagaaaaccaaacaccacatgttctcacttataagtgggagttgaacaatgagaacacatggacacagggaggggaatatcacacactggggcctgttgtggggtgggggcctgggggagggatagcattaggagaaatacctcatgtaaatgatgagttgatgggtgcggcaaaccaacatggcacatgtatacctatgtaacaaacctgcacattgtgcacatgtaccctaaaacttaaagtataataataaataaattacatttcttccaacgtatttatcagctacaaaagcggacccttttaatctccctctcaccaactactacttctgtgtctcaatttgtcattaaatcaagtgaggaatgtttattcttagagccatccttaaaaaagaaaagaaaagaaaagaaaatatcttgcacttatctttggttgatgacctaatatctggaacactgtttcttattaataagtttgtggtaggctataataaactccatataaagccatgccagttgtgcacatgtaccctagaacttaaagtataataaaaaaaagaaggggttcataagcaccctgtaaacactgaagcctattcaaaaggagaggggtaggacacatytcaccatcaatcatcacaagacgacaatggtatgaataaccaatgtttacttcatacaggggctacttaaggaggtcactatatctcartgtgaaaactccaatgaaccagkcactatgttcaattgaaatcaacctagagaaccttatctctctgcataaatgctcctgctgcatggtttttcatggccactggtggaattctgtgatgggggaacaggaaatctggacacagaagggtgggaataaaatgagcctgtgctgctttcaaaaaaaaaaaaaaaaagaatagtccataggctaaagcttattgctagggttaccacctagaacagggaagcttaattgtgaattagaaagtagatttttttctttttcaaagttcaaagataagacaatagccagacattcaagtggttaaaggattttctgagaacttccaaagctgggtttttacctaacaaaaagcatatttggaggattattttatgtcataatcatagtaagaagagtaattctagacaccaaggactggtcagtccatcccatttaggtatgggggactgaggtacatagattcagagtgggtgaggctagggtaagaatgatacctgggccctgaggagggaataagttccctttatcttagagrtgaaacaaaatagaactttcacaaaggccaaagagtaatccctaaaactgcaggctgttgctagggtttctctgggtatrgcctgcaaaacccacagaccttttggaaagtcttgtttggagcaaagtgccatctctgtcatagcacagtagtaatgaataaaggatgaaggacaaagccaaagggcagtttttatagggttctgcacactccagggtaatgcagagaaagcaaccaagagttttgactatcccctgaccaccccccmaccacctccccgcaggagytgatagtactgagtgggctgcaagactgaaattggcttggtttcaagagggaggaggaggcagctctatgcagatttcttgtgaacrgagagattggacatctctctgcaactactggcacagcttgcctgctgaccaagtggatgaagtcaaagcaaaacctgatgctgagaagtgaagctcatgaaaagccatcctggaaggacagtaaaagaagtcatgcttcagggaggcagccaaaatggccgaataggaacagctccagtctacagctcccagcgtgagtgacgcagaagacgggtgatttctgcatttccatctgaggtactgggttcatctcactagggagtgccagacagtgggcacaggacagtgggtgcagcacactgtgcgcgacccgaagcagggcaagacattgcctcactcgggaagcgcaaggggtcagggagttccctttcccagtcaaagaaaggggtgacagacggcacctggaaaatcgggtcactcccatcctaatactgcgcttttctgacgggcttaaaaaacggcgcaccaggagattatatcccacgcaaggctcggagggtcctacgcccacggaatctcgctgattgctagcacagcagtctgagatcaaactgcgaggcagcagcgaggctaggggaggggcgcccgccattgcccaggcttgcttaggtaaacaaagcagccaggaagctcaaactgggtggagcccaccacagcccaaggagcctgcctgcctctgtaggctccacccctgggggcagggcacagataaacaaaaagacagcagtaacctctgcagacttaaatgtccctgtctgacagctttgaagagagcagtggttctcccagcaggcagctggagatctgagaacgggcagactgcctcctcaagtgggtccctgacccctgacccccgagcagcctaactgggaggcaacccccagtaggggcagactgacacctcacacggccaggtactcctctgagacaaaacttccaaaggaacgatcagacagcagcatttgccgttcacaaaaatccgctgttctgcagccaccactgctgatacccaggcaaacagggtctggagtggacctctagcaaactccaacagacctgcagctgagggtcctgtctgttagaaggaaaactaacaaacagaagggacatccacaccaaaaacccatctgtacatcaccatcatcaaagaccaaaagtagataaaaccacaaagatggggagaaaacagagcagaaaaactggaaaccctaaaaagcagagcacctctcctcctccaaaggaacgcagttcctcaccagcaatggaacgaagctggacggagaatgactttgatgagttgagagaagaaggcttcagacaatcaaactactccgagctacaggaggaaattcaaaccaaaggcaaagaagtaaaaaactttgaaaaaaatttagacgaatgtataactagaataaccaatacagagaagtgcttaaaggagctgatggagctgaaagccaaggctcgggaactacgtgaagaatacagaagcctcaggagccgatgtgatcaactggaagaaagggtatcagtgatggaagacgaaatgaatgaaatgaagcaagaagggaagtttagagaaaaaagaataaaaagatatgaacaaagcctccaagaaatatgggactatgtgaaaagaccaaatctacgtctgattggtgtacctgaaagtgacggggagaaaggaaccaagtgggaaaacactctacaggatattgtccaggagaacttccccaatctagcaaggcagaccaacattcagattcaggaaatacagagaacgcctcaaagatactcctcgagaagagcaactccaagacacataattgtcagattcaccaaagttgaaatgaaggaaaaaatgttaagggcagccagagagaaaggtcgggttacccacaaagggaagcccatcagactaacagcagatctctcggcagaaactctacaagccagaagagagtggggacaaatattcaacattcctaaagaaatgaattttcagcccataatttcatatccagccaaactaagcttcataagtgaaggrgaaataaaatactttacagasaagcaaatgctgagagattttgtcaccaccaggcctgccctaaaagagctcctgaaggaagcactaaacatggaaaggaacaaccggtaccagccactgcaaaatcatgccaaattgtaaaaaccatcaaggctaggaagaaactccatcaactaacaagcaaaataaccagctaacatcataatgacgggatcaaattcacacataacaatattaactttaaatgtaaatggactgaatgctccaattaaaagacagactggcaaattggataaagagtcaagacccatcagtgtgctgtattcaggaaacccatctcatgggcacagacacacacaggctcaaaataaaagatggaggaaggtctaccaagcaaatggaaaacgaaaaaaggcaggggttgcaatcctagtctctgataaaacagactttaaaccaacaaagatcaaaagagacaaagaaggccattacataatggtaaagggatcaattcaacaagaagagctaactatcctaaatatatatgcacccaatacaggagcacccagattcataaagcaagtccttagtgacatasaaagagacttagactcccacacaataataatgggagactttaacaccccgctgtcaacattaracagatcaacgagacagaaagttaacaaggatacccaggaattgaactcagctctgcaccaagcgacctaatagacatctacagagctctccaccccaaatcaacagaatatacatttttttcagcaccacaccacacctattgcaaaattgaccacataattggaagtaaagctctcctcagcaaatgtaaaagaacagaaattayaacaaactgtctctcagacctcagtgcaatcaaactagarctcaggattaagaaactcactcaaaacygtgcaactacatggaaactgaacatcctgctcctgaatgactactgggtacataacgaaatgaaggcagaaataaagatgttctttgaaaccaacgagaacaaagacacaacataccagaatctctgggacacattcaaagcagtgtgtagagggaaatttatagcactaaatgcccacaagagaaagcaggaaagatccaaaattgacacystaacatcacaattaaaagagctagaaaaacaagagcaaacacattcaaaasctagcagaaggcaagaaataactaaaatcagagcagaactgaaggaaatagagacacaaaaaacccttcaaaaaagtaatgaatccaggagctggttttttgaaaggatcaacaaaattgttagaccgctagcaagactaataaagaagaaaagagagaagaagcaaatagatgcaataaaaaatgataaaggggatatcaccaccaatcccacagaaatgcaaactaccatcagagaatactacaaacacctctacgcaaataaactagaaaatctagaagaaatggataaattcctcaacacatacaccctcccaagactaaaccaggaagaagttgaatctctgaatagaccaataacaggctctgaaattgtggcaataatcaatagcttaccaaccaaaaagagtccaggaccagatggattcacagccgaattctaccagaggtacaaggaggaactggtacgattctttctgaaactattccaatcaatacaaaaagagggaatcctccctaactcattttataaggccagcatcatcctgataccaaagccgggcagagacacaaccaaaaaggagaattttagaccaatatccttgatgaacattgatgcaaaaatcctcrataaaatactagcaaaccgaatccagcagcacatcaaaaagcttatccaccatgatcaagtgggcttcatccctgggatgcaaggctggttcaagatatgcaaatcaataaatgtactccagcatataaacagaaccaaagacaaaaaccaccatgattatctcaatagatgcagaaaaggcctttgacaaarttcaacaacacttcatgctaaaaactctcaataaattaggtattgatgggacgtatctccaaataataagagctatctatgacaaacccacagccaatatcatactgaatgggcaaaaactggaagcattccctttgaaaactggcacaagacagggatgccctctctcaccactcctattcaacatagtgttggaagttctggccagggcagttaggcaggagaaggaaataaagggtattcaattaggaaaagaggaagtcaaattgtccctgtttgcagatgacatgatagtatatctagaaaaccccatcgtgtcagcccaaaatctccttaagctgatamgcaacttcaacaaagtctcaggatacaaaatcaatgtacaaaaatcacaagcattcttatacaccaatagcagacaaacagagagccaaatcatgagtgaactcccattcacagttgcttcaaagagaataaaatacctaggaatccaacttacaagggatgtgaaggacctcttcaaggagaactacaaaccactgctcaatgaaataaaagaggatacaaagaaatggaagaacattccatgctcatgggtaggaagaatcaatatcgtgaaaatggccatactgtccaaggtaatttatagattcaatgccatccccatcaagctaccaatgagtttcttcacagaattggaaaacactactttaaagttcatatggaaccaaaaaagagcctgcatcgccaagtcagtcctaagccaaaagaacaaagctggaggcatcacgctacctgacttcaaactatactacaaggctacagtaaccaaagcagcatggtactggtaccaaaacagagatatagatcagcggaacagaacagagccctcagaaataacgccacatatctacaactatctgatctttgacaaacctgagaaaagcaagcaatggggaaaggattccctatttaataaatggtgctgggaaaactggctagccatatgtagaaagctgaaactggatcccttccttacaccttatacaaaaattaattcaagatggattaaagacttaaacattagacctaaaaccataaaaaccctagaagaaaacctaggcattaccattgaggacataggcatgggcaaggacttcatgtctaaaacaccaaaagcaatggcaacaaaagccaaaattgacaaatgggatctaattaaagagcttctgcacagcaaaagaaactaccatcagagtgaacaggcaacctgcaaaatgggtgaaaattttcgcaacctactcatctgacaaagggctaatatccagaatctacaatgaactccaacaaatttgcaagaaaaaaacaaccccatcaaaaagtgggcgaaggacatgaacagacacttctcaaaagaagacatttatgcagccaaaaaacacgtgaaaaaatgctcaccatcactggccatcaaagaaatgcaaatcaaaaccacaatgagataccatctcacaccagttagaatggcaatcactaaaaagtcaggaagcaacaggtgctggagaggatgtggagaaataggaacacttttacactgytggtgggaatgtaaactagttcaaccattgtggaagacagtgtggcaattcctcagggatctagaactagacataccatttgacccagccatcccattactgggtatatacccaaagaactataaatcatgctgctataaagacacatgcacacgtatgtttattgcggcactattcacaatagcaaagacttggaaccaacccaaatgtccaacaacgatagactggattaagaaaatgtggcacatatacaccatggaatactatgcagccataaaaaatgatgagttcatgtcctttgtagggacatggatgaaattggaaatcatcattctcagtaaactatcacaaggacagaaaaacaaacacctcatgttctcactcataggtgggaattgaacagtgagaacacatggacacaggaaggggaacctcacactctggggactggtggggggttgggggaggggggagggatagcattaggagatatacctaatgctacatgacgagttaatgggtgcagcacaccagcatggcaaatgtatacatacgtaacctgtacattgtgcacatgtaccctaaaacttaaagtataataataatgaaagacaaaaaagaagtcatgcttcctcttatatccaaatgccaacttggtaagaagggaggagataactgtagggagrggtagaaatttttatggattaaacagccaaagcaaagtgttttaaatcagaagatactgagatgcctttttaaatgacaaggttgatttttttcctgtgatgatttgaaatagcgacttgtaactagaaacaagtttagaaaatacagttayttttttttgtttgtttgtttcatgccctggattgtggctgaccagtttatacctactgtgctggaaaagtttaaattataaattactgtcacagtctccgtagatactaaaatctctgatctataaaacctgtattgcatgagcaatactgtcattcctcctttttctataacagttattaaaggagaagaactatgctacgattcatgtgtatttactgagcatataaagcagtctatgcagttcgtacatacctctctctaaatgcattgaggaaaattatatctcttacgtaaatcatctaagactttctgaattttgttagatcctgccatttcttrttttacacaggaggctgccagctatcaactgattgaattgattacttcattaaagcyagaaatacagatctgatgagttttgcaattaattgtatagaaagctgggcttggaaaaagaagaggatgcactgagtagcagagtagacctgatgctcagttaaacctaaactgctactggtacagcaagtcagacaagcagtctggaccttactcagggtcaggagaaagcggcaaatcagaacccaggaagagagtcagggaacattatggtatatacccattgaatttagatgatcaagagtttaagccagacagtaacctacagggctacagggcaataaagagtcacacgtaacaaatctttgttgtgaaatagacaaatatttcatgctatttcagaaactattcccagagttgagcagagtaaatctgcagttaggcagtgttaggtaagtgaaagaatcatgtgaggttaggactaaggcttcatcctgatgtcagcctgtggtggtacattctgacactaactgcagacaaatttctcaccttcatatgtttcctgaaaacttatcccgaatttatttttgttaattatctcatctcctcttatacccaagtgcattccttgactcaacttctcatctttcttttatgtatcccaaaaaagtttgctcctcatcagtgtcctttacactgtaaaatttttgcctgagagtattctcttttagaaaatcttctcatatcaattccaagtagttttaggtggaagcacagaaacactaaatctctgttgtcaatcaggttatgctaaattatgctgcataacaaacaacatcaaaatttcagttatttaacacaggtctccarcccctggtgccagtttatggacaaactgtcttctgaaaaactggtccctggtgccaaaaaggttgaggaccgctgatttaacccatcaaaagtttatttctcctcacacagatacactgtgtaactgggtgattctctggggtgactgacttcgtcttggtagtttagcaatccagactgctttgatcttgtggcaccatgattgctatggcagggaggggagattctgtagaaagtctcacactggcaattaaatgctttgacctggcttaagtatcattggccagaatagttgcatggtcttacttcactgcaaggagtggggaaatacaacccttgcatgggccggaaggaatgggatatcagaatggataagtacaaagtcactagtacaccttatttgggcagtgtaaggtttttgtggtgattattgatttctgagaagcaagaaattataatggtgtttgttaccgtaagtgctttttttaatctacccattgtctaataacctttaaaatatttcctaaagggcaggttatttactgaatcttgaggatgccagtgcctggagatatgtgtgtgtgtgtgtgagtgtgtatatgtatatctgcatacacataaatgagattatatccatagaaaatatttgattctttttcagttcttaatatctagcataacaggcaggtttagcatttttttaaataatcctactgtcttaaaatggtatgtggaattatgttcccaagaggatctgaagagtatgagggcatagccttcccattaaatccattaattctctatgggagctccatatcagcagcttctgtttccagaaaacagtaaatatattgaatggagagaccattaaaagaaatacagaaagcttagatgtatctctgaggggcgatttgaccccagcaacagtatctgactccttattatttataaacatacggtgtctacatttaggaaaaaattcttctgaaattggtaaatcttcgaagacggaaggaaatctatttaatttttttttgacacaaggtctcacgctatcacccaggctggcatgcactggcacaatcacagctcactgcagcctcgacctcgtcaagcgtgatccttctacctcagccttccaggtagctgggactgcaggtgtgcaccaccatgcctggctaatttttttattttttatagagatggaatttcaccattttgcctgggctggtctcgagctcttgggcttgagtgatcagcctgccttggcctcccaaaatgctaggccaggcatgagccactgtgcctggcccagaaatctattttaaaaggaagaaaactgataggaggaccacttgaaaaaatatttatatgtactgtagttgccctttgtttttctgtcagggttttgaattagctatgttgaatgagagctctcagtcagcaactactgatttcatttcaacagagcaaacacaaacatactgaacttagattttagaaaaataactttgtgtatgatggttcacagaaccartggtgatggttcacaatgatgcttaaaggttcatcaagccctgccaataaaattagtctgggaacatttaatatgtttgtcacaataaaatgttctatataacaaacctctttaaaggaagtggtggaaattagtttctaacagctgcatcaaatatcaataagtacgtttgcaaaaaactgagctgatagttgagacttttattttaggattgaaaaaaacaatctgagaattaaattcatatactkgtctacaattataaattacaaataatttattatatggttaaaacaatcatgctttttattttgcttctacctcttttatttaaaaagtagctgtaagaataacagaactgaaattaagtatttaaatatctaaatatttcttgctatggaaagcaaaaaagctgatgtgctttaagttattgtgccattgtgcatgaactaacatgggttgttgagtgcttgcttatgtctaggcattgttacctatttattatgtgtagtatctcctttggtcctattattaccttgtcaaaattaacattcacatatatccagtaaattgaccaagggtacctagccacaaagtgttagaagcaaaatttgaatccacatgtatgttcttttcattatactgtttttgagatttggaatgggagtggcagagacaaggggatgatcatgaagcagccatgatctgatctcattgccgtttttgactattcaactattcaacatcatgaacattaccttttttcagattctttatttgctgcttttcatggactctggacaaatgactagttttttgtctttgcctgtgtttcttgtactctttcaggatcatttccctactctaatgatgttgctaaggggaatggcagagtgctggtcctgtcatctttattgctaacatctcctttgagaaatatggttctggcaggtttttagaatgtagatcaacaagataagagttgtactaggccttcataagcagtgaggactggagaaatcacctagattcctcaggccagatatgaatgggctagtgttagctcatagtacaaatttcttttctaaacaaaagactatctccttgttccttcttttggaattaaaagttgcttgtaaataactttttcataatctctataactggtgtctacagattttggaaacagctttaatggtagcatatttgaaatgatctttgatctattaaaaaaaatttgtagcacgtttagaaaccaacttaagatgcagaacttttctttttttgcctttctctggaaatttctaatgatatgtccttatctttgtgtaattcttagctgagcatggaggtgtttttattttttatataattaataattttattactcaggaaattatacttgcaccttgaggacaccttgaaaatttggaattccagtgtactcagacaggggagattcatgaaacatagataattgaatgaaatatgaactagctttctaattgaatgaaatatgaactagctttctaaactctgactgtaggatcacatccctgaattgttaagggtatggagaaaaatctctgagctgccaccacaaagccagtcctctcacttgatgccccaggagtgatctaggactctccccagtgttcaggttagtggttttacctgctggtctaattagttttccttggcagtcttcagttcttctttcagatcagaaatagtatccccaaatggaaaggccccataatagatgaatttttataaagggcctaagtatttgaatattactrtaagacatcattattatagcagagtgacacgatgttccaaagtattcccatagtcatccagaaaagttcagcatgtttatgctgtacagtaacaaaaagaagtgagtgctgtaacttagaaaaattcgttttaaaaaagtcagtgttaaaaaaaaagtgagtcctttctccctattaccttccttcctttgtgtaacaaagattaattttacttctgctgtgtgccagaacagtactgaatgctgtggatacaaagatgaataaaacatgttctttgtcctcaaagagcttgctatgtaattgttcaaatagacataagaaaataattagaatatgatgtagtattttgatggtagtgttcaaaatatttctggagagcatagaagaagarataataatgaaatcttcctgacatggtatgcgggggacctatcaggactagcttcaggttcatggtgaattttccagttaatacttcattttccagtggtgtcarataaatgaggtacagctatatttttgaaagattacctgtttggcatttaacatcattcctctgggattttaccctgttttgaatggaaggtagcctttttgaaagaagatgagccacttttgtaaatttagtatgaaacattttgagctcctcaagaaatttctttataatttctaaataaatgggacctaattaaactaaaaagcttctgcacaccaaaagaaataatcagcagagtaaacagacaacccaccgagagaaaatattcacaaactatgcatttgataaaggactaaaatccagaatccacaaggaatgcaaacaaatcagcaagaaaaaaaaatcccatcaaaaagtgggcaaaggacatgaatagacatttcttaaaagaagatatacaaacagccaacaaaaatatgaagaaatgctcaacatcactgattatcgggaaaacgcaaattaaaaccacagtgagataccaccttactcctgtaagaatggccataatttaaaaataaaaaataatagatgttggtgtgaatgtggtgaaaagggagtccttttatactgcttctgggaatgtaaactagtacaaccactatggaaaacagtgtggagattccttaaagaactcaaagtagaactactatttgatccagcagttccattactgggtatctacccaaaggaaaataagtcattatgtgaaaaagacaacatgcacacacgtttatagtagcacagtttataattgcaaagttatggaaccaagctaagtgcccgttgaccaatgagtggttaaagaaaatgtggtatatagacaccatggactactactcagccattaaaaggaatgaagtatgttctttgcagcaacttagatggagctggtggacattattctaagtgaagtaactcagaaatggaaaaccaartattctatgttctcatttgtaagtggaagctaagctatgaggatgcaaaggcataagagtggtatggatgttggggactcaaggaaaggttgggagcagggtgagggatgagttgggtacagtgtacattactcagatggtgggtgcattgaaatctcagaaatcaccactaaggaacttatccatgtaaccaaaaactacttgcatccccaaaaactattcatataaaaataataaatacaataaaatacaaggtattattggatattctttagccatagaaccattttttagaaaatcatgtatttgaatgttgagtatagtacaagaccactatctgtataatcttatgtaatttaaaagttttaattgtatacatacttaatctcataaatagtgggtacatatctgagaataatttcataaaaaagctccttaaaacgaattcaytttaaatcaaattcaggaagaaggggccaaaatggtgaactagtagcacctaatgtgcaccactctcatggagataaaacaaaagggctagttaaccctgaccctgtaggctgatgatctgmgaaaccacattagggtccatcaaggcagcagggggacacagagagcagagaggaacaaagaagggcatcaatctatctgggctcagtgtggagccaggagaacctcccaaacatgggaaagaatgagtgagtgtgagcttcctgggggagcacatccccctgcgcttataggctgaagcagagagcccattttgtgtgggggcaactctcgagtccaaggagaccactctgagacttgggccctggagcagaccaacactggcaccatagcaccaatagaaccttcagtcatggggcctgggagcagtaagattacaccacttctgccctcctccctccatccctgctggatgaggcttggtgtcagcttctggcctagtggtcctgcttctgtctgaactcggacagaggtcctggcttgctattgtcccaggaaggacccagatggcagggtgggccaccctacccacccctgccacaggtagccaggcaagcaatgcctgctagagtttctggctcagtagtccagcttctgtgtgaacttaccaagagggtgcaacctccctttgtcctgggaaacacctggacaaaagggagagtgacctcaccccaaccctgtcacaggtagccaggtagcaatgcctgctagaacttctggcaaacagtcccacatctgtgagaactcaggaagaaggtgcagcctactgttgcttgtaaagtgtctagagagaaggggtaggtcacctacaaagggaaccccatcaggctaacagtgaaactttcagcaaaagccctacaagtcagaagagattggggggtctatattcagcattcttaaagaaaagaaattccaaccaagaatttcatatttggcaaaactaagcttcataagagaaggagaaataagatccttttaagacaagcaaatgctaagagtatttgttaccaccagacttgctttacaagatgtcttgaagggagtgctagatatagaaaggaaagactgtgttaccaaccatcacaaaaacacatttaagaacgtagacyagtaatgctataaagcagcaacacaatcaagtctgtgtgataaccagctaacaacatgatgatgaaatcagacctgcatataccaatattaaccttgaatgcaaacaggctgaaagccctaattaaaaggcacagaatgacagcttggataaagaagcaagatcgaactgtatcctctctacaggactcatctcacatgcaatgacactcataggctataagtaaagggatggagaaaaattgcccaagcaaatggaaaacagaaaaaaggaggggttggcattctactttctgacaaaatagacgttaaaccaccartgatcagaaaacacaaagaaaggcattacgtaatggcaacaggccaaattcaacaagaagacttaattattctaaatatatatgtacccacccctggagcacccagactcataaacaagttcttacagacctatgaagagacttggatagccacacaatagtagtgagagagttcaacaacccactgacactattagaagatcatggggcagaaaactaacaaagatattcagaaccagagctcaacatttgaccaaacgggcctagtagacatctacagaactctctacccaaaacaacaagatatacattcttctcatctgcacatggcatgtactctaaaattgaccacacaattggccataagacgattctcagcaacttaaaaaaaaaaaaaacttaccaaacacactctcagaccaaagcacaataaaaatagaaatcaatactaagaaaattgctcaaaagcatacaattacatggaaattatataacctactcctgaatgacatttgggtaaacaatgaaattaaggcagaaaccaagtacaacataccagaatctctggggcacaactaaagcagtattaagagggaagtatatagcactaaacacccagagaaacggactaaaaagttaaaagttaaaaggatctcaagttaacctaacatcacacccagaggaaccagagaaatgagcaaaccaaccccagagctagcagaagacaacagataaccaaaatcagagctgaaatgaaggaaactgagatgtaaaaaaccatacaaaagatcaacaagtacagaaattgattctttgaaagaataaataagattgatatgccactagcgagactaatagagagagagacagaagatccaaataaacagaatcagaaatgacaaaggggacattaccaccaacccaacagaaatacaaaaaaaccccagagactactgtgaacacctctatgcatgcaaactagaaaatctgaaagaaatggataaatgcctggaaacatacgacctcccaagattgaaccaggaagaagttgaatccatgaacagacaaataatgaattataaaattgaatcagtaataaaaagcctgccaatcacaaaaatcccaggaccagacagattcacagccaaactactgaatgtgtaaggaaaagctggtactattcctactgaaactgctcctacaaattgaggtggagggaatcctctctaattcattctgtgaggctagcatcattatgataccaaaacctggcagagacacaacaaaaaagaaaatcttaggccaatattcctgatgaccatagaagcaaaagtccccaacaaaatactagcaagccaaattcagcagcacatcaaaaagttaatccactgtgatcaagtaagctttattcctgggatgcaaagttagttcagcatacacagatcaataaatgtgatttgccacaaaaacagaattataaacaaaatcacatgatcctctaaatagatgcaggaaaaaaagcttttgataaaattcaatatcccttcatgttaagaaccctcaacaaactaggcattgaagtaatgtacttcaaaataataagagccacctatgacaaacccacagcaaacatcatactgaatgggcaaaagctggaagcattccccttgagaaccggaacaaggcaaggatgccaactctcaccactcatacttaaccatagtactagaagtccgagccagagcaatcaggcaagagaagagcaatgccaagaggaagagaggaagtcaaactatttctgtttgcagatgatatggttctataactagaaaaccccatagccactgcccaaaagttcctagatctgataaacaacttcagtaaagtctcagaagacaaaatcagtgcacaaaaaccagtagcatttctatacaccaacatcatctaagctgagagccaaatcaagaacacaatcgcattcacaatagctacaaaaagaataaaatacttaggattgcagctaatctgggaggtgaaagatctctaaatgagaattacaaaacactgcccaaagacatcataggtgacacaaatggaagaacattccatgcccatagataggaagaatcaagattgtttaaaatggccataccacccaaagcagtctacagattcagtgccattcctatcaaactactgatgacattctccatagaattagaaaaattatttttaaattcgtatggaaccaaaaaagagcctgaatagccaaagcagtcctaagcaaaaagaacaaggttggaggcatcacattacccaacttcaaactatattacaaggctacgataaccaaaaaagcacaatagtggtacaaaaagagacacacagaccaatgagactgaatagagagctcagaaataatgccagacatctacaatcatctgatctttgacaaagtcgacaaaaacaagctatggggaaaggactttctatataataagtggtgctgtgataactggctagcaatttgcagtagattgaaacgaaccattagagaaatgcaaatcaaaaccacagtgagataccatctcacaccagtcagaatggccattattaaaaagtaaaaaataatagctgctgttgaggttgtggagaaaagggaacacttatacactgctggtgtgtgtaaattagtttagccattgtggaaagtagtgtggcaatttctcgaagaacttaaaacagaaataccattcaacccagcaatccctttattgggtatatacctgaaggaatataaatcattctccacaaagacgcatgtgtgtgctcatcacagcactattcaygatagcaaagtcttggaatcaacctaaatacccatcagtggtagaccagataatgcagtatggatataccatggaatactatgcagccattaaaaaagaatgagatccttcgctttgcaacaacattgatggagctgaaagccatgatgccccatgttctctcttacaggtcagaggtaaacattgagtacacatgcacacaaataagggtacaacagacaccagagcctcctagggtggagggtgggaggagggaggggattgaaaaactgcctgttgggtactatgcttattacctgggtgacaaaataatctgtataccaaacccctgtgacatgcaatttacctgtataacaaacctgcacgtgtacctctgaacctaaaagttaaaaaaaagaagaaaaaaataccctgggatcagacatttagagtaaattgtgaaaaattacactaaaacttagacatataagttgattttagttcaattaagaaaatttgtataacagaaactatgttctaattatagaagaacaatgaaaattagtgtttattggyattttttgtatgtacaatagcacataatttttacaaaaaaatagtaaattgcttctatcagtttttctaagggactctcttagtccttggcagacaagtcattctgaagaatttatcctgtcattatcctttttgattttctcatcagggcctttgaatgtgatcctgcagttctccatcatccctttaatggatttcatgaaatcttttaagtgattttcagtttcattataaaatggaattaatttgccctgtgtttgttgacaaaccaatctttatgatagaatggctgtgatatatttggtttacaatccagtttcttggtattagaaactctgaagtgatgtctttttgtttgcttatgagttgactgatggctggcagcatctaggtagcttcatgatgggggctggtcactggaaaaaccaaggcaggattagaggggtggggctgaaagtcacaccaacatctgtgctgaaagttaatttgatcaccaatggccagtggtttaatcaatcatgcttatgttatgaaacctccataataactcraagggtttggagaactgcttgatgactgatcacgcagagggtggtatgcccaggaaaggcatggaagctctgtgccccttccccccataccttgccctatgcatgtcttcatctatatcccttgcagtatctatgtggaagtaagcttaagtatttgtgtgagttccgtgatttcgttcgggcagattaattgaacccaaagacagggttgcagaaaccctaactggaagccagtgggcagacgttctggagacccagacttgtgactgttgtgcaaaggcggaggggtgggagggcagtcttgtggactgagccctcactttgtgggatctgaaactacctccagttaggtagtgtcagaattgaattggaggacacccagctggtgtccactgcagaattgattgcttgcttgttgtgtggggaaaactcttcacacatttgctcacagaaatcttctgtgttgatttttgttgtggtgtgagagcagaggaactgtggttttccgtacacagaatggtcgatayayatatagatatttggctttggtctaattttgtaagtggtcatttaattagcattttcattttgtgatggcatttgatttcctatgtactgtgtttttttcaaactagtatacatcaatattttttaacacaacatttcatttactcttaattatttatattatgtatagttctcacttcataaaaattataatcctaatttagaaaccaggtagattgtgaaatggcaaagttgatgatgatggctcctccaatgacagtgataatagctgccatttgtaaagcttctactctatgccagctgctgtactaggtagtttaataatccttcccacaacctcaaaagattgatgttaatcacctgacttcatggataaagaaattcaggaaattcgtagaggcaatgagtgtcttacaagttaaaaacaagccattataatgatcaagtttgtgtttttttccaaaacactatgtctttctttggtttatagaagcatttacttcagggttttctctataaattaattatatttttggtacatataatataaagttgataaaaattggaatagcccacagttgtaggaatacttttctatgttattatttctatctgtattattaatgcagtgggtgttaatcttataaaaattattttttccttttgctttttttgttgagaggtatttcacaaatactccttcttcagcagatttgaatcaaaatggaatggaagatgtggaatttatgaaattggattttcacaacaaaaaagtcataaaatatactgtaatgttttaaaaatggcttgactgtacatccatttctaatagtttattttcaaagagaatggtgtaccatttcccaatgacttcttaatggaaaccagtgattgccattggaattgcagttattttacagtgtgtgtgtttatataaaccattactctaaaatatcaggttgcagctttggtatgtgaatgaattgaaatgaacgaaatttagatattttactgttttttatagctgcagaaactggaattgcagatactagtcttgatttagcctatggtgaattttcagttatttgaaagttttatttctcattcaaagagtagcttttatcatggcctttggtcagagatgctgtttgtattgttaaaataaaaatctcttcaatatcaaatagtatataaggaaggaatccagaattagcctgttaggcacacacagctttgtggtcccaggaataatggcattcttgaatagtaactcctgagatcagtaaaacttcagaagttattgctttattgtcatttttttactgtttgtcctctaacatgtgtgattaataatacatttctcatgtatagccataatgtgccattgagttttggatcttttgattacttgtattctctcctaagaaaaataatgggattgcattcttaaagctaccagtttcttgcaggttattatttgacatgcatattacatttttggtacagctcatttccagggacttgctctgttgctatttctcactcagcatgtttcagaactaccaaacctgctgaggcattaagcatactctttgtatatgctcttaggaatatgggaattgcccatatcgaagccagtcatccagccatcatgtgtgattttctgctttgaacacatttttgtcttgtgttagaggtaagcattaaggtcctatgagtctcctacttcagcagtcatatacagaagatagaaacttaattttgattgcatccagtgatstttttatataccctgaaagcatgatgttttataattctggtctagtgtgtttgcagttttgtttttatttatatgtatctctaaacctaaaacaagtttttatagaggaaattttaggtaaattttgtataattttttaaaagttgtcagaaatctttattttacatctgttccscctttagatactaatatccccatgtgggaaatggaaaatgtaagttctccatgctgttgtaagggctgtaaacatttctcaaaagctatatcaacgcagtcaccagaacatgtttctgctctgttgcatgtttgtttccccatccttttaccattgttgcattttgtttttagtggccctaagaagcctgcttctttaattttttttctttaatcctgtctacattctttgttaaacttttggtctttgtcacttctagattactttactaccatagatttccctttctgtctttaagtttgttattttgaatcactttcaactttttctgtgacacactagtgaggaactgttcagaktgaattcactaggtggctagcatcttagagtcaaaacataaaatgttgaaattgattaactagagatagtaatgtcaatttttaagtaattaaacattgtctagtttagaacaaagtaaaccccattatagaagtgggaatttaggaagagggaatgccctgttgttatatagcctttctgtataaaatattataggaaatatagaatcagatttatggtagttaagaactttctaaatgaattttagtatattttcacaggaatgatgtgaaaagaagaatggatgaatgttatctgtgaaatggtgagaaaagaaggaactgtgagaattgtgttttgttatttaaggacctgtgaaggagatggaggagatcataagttccaccagtggtggagctagatctcctggattcatttgaatagaaaaagagaggatatgttgtgttctgtagatgaaggctatcaaaggacacctcaatggaagatcccaggaggaaggtgataaacaaatggaaggtagacttgagtgtagctttcttctgaaatgggaagagagtagaagtaaaagcagaaaagaaaaatgaggctgttgcttataaaayttgaaaacgtttaaaagattgggtagtagttagagtctgagtaactaacattttaataaataatagaatctataaccaattgtgtacttttttattttaaaaaawttttttaatagaaatggggttttgctccattgcctaggcttgagtgcagtgacacaatcatggctcactgcagcctaaacctcctgggctcaagtgatcctcccatttcagcatcccaagtagctaggagtacagctgcatgccaccgcacctggctaatttttaaattttttgtagagatggtagtctcactgtgttgcccaggctggtcttgaactccagacctcaggtaatcctcccacctcagcctcccaaaatgctgagattacaggtgtgagccaccctgtccagcctgttaacatatttttaatagatgtttttgagttattaaatacccataccctgcagcattgtggatattttatgttttctcactcagtgtcactgattggttctttatagtctctgaattaaatatattttcaaagtagcatgttttctaccaagcgaggtattttattgttatttaattattgacatccttgaaataagagtggctttgyatttaagaggtatatgagggaacacagctgaaaaacaagagcatttttgttagaaatatattggggataggtgctggggtgggagggagactcactaagccagcaattttcaaaagttacagtagtatatataaaatttgaagttaattgagaataactagagaatgaaaccttctgaataataatagagatagttttgggaggcaggaagggaatgtctttggttgcgataatgtttattgctttgatctaagtgctgattacatgggtgtatttctgtcttaaaagtcattgagactgggcaccgtggcttatgtctgtaatcccagcactttgggaggccaaggcgggtggatcatttgaggtcaggagttcaagaccagcctgcccaacatggtgaaatcctgtctctactaaaaatataaaaattagcckgctgtggtggtggacacctgtaatcccagctactcaggaggctgaggcaggagaatcgcttgaaccctggaaatggaggttgcagtgagccgagatcacgccactgcactccagcctgggttacgagtgagactccgcctcaaaaaaacaaaaaagaaaaaagtcattgagctgtataaaatataaataaaacttaatgtttatacattttgctgtatgtaaattatatctcaattcttaatgcaggaaaaagcacactcctaatgggtacttcagactgggatttttaaaaaatttctgttttgtttactaagtgtactggatatacgtctagtatcatctttaatgttactttaaaaatattctttaaagtgataccactggaagaaaaactagccaatttatttcacttataactgtcatgagctgaaatttcccaacactgacctctgtttcagattcctgctgttgcctctgcactattagttggtgtcagcagggggttagcagcactcaatttaaccttgctatttgtattctgttttgaatttttttcttttctcatttaacttccttacatggwttctccattttaaagattgtgcatgcaccatggggtctgtacagtgaaagactgtagtacagataagcatacaatagaagcacatttaaagataatgtgaagctgcttttcttttttttcttgaatagaggcattgctgtgaaaatcattaaacaagagaaaaattaagcctactcatgctgttatttttccgttaagattatagaccagtttaaaatatataagaactatatagatatggattaattatacattttatgtccatttagaggggcatctctgtgactgttgtgcttgtagctagccatggacagagacttattggaccagaagtacttcttttgtctctcccacattaaaattttagaatctgttatgactgagaccacatccactattcttatttcaatgtgccccctctcattgatccctctactcccttcttggaccttttatcttataaatgctgggaccttcctattcaaagcagtcttctacagcaggataggaagtcatgggtaattaaagaggggcctctaaactccagacccttcctcctcaactccccatggaaactgtctcccctgaacagtgctttgtagaatcctagtgaacttaaagactcactactcttatgagtggtctttatctttctctgagtgggttctaagtaaaacaccaggttggtggaaatggaaaggaaggacggctggctcaaattctggagatactatatgaaaaggaataatgagacactcactgtcctgtggggtaagcaggaaggaaagcctagcttcccattccacagcctccaattccattcatttccagccactgctttgtacagctccagcacactcctctcctggtctgtagttcaagattccactagtttcatctccaggtgccaaagacactctgcttggtgcctaagacaccaaagtgaaaacaacagccatggaaaacacttccagttaagttgagggagaccgagatttcactatgtatagcagggagacttgcattcctgttagctcaaacagattctgaaggcatttctccagagatgccttgcttaggtgaatggggagtgtaataacccaggtattgtattttaatattataatagtctactcttatgctagggtgacatacatcctggcttgtactggatgtatgtcaccatcctggcataattgttgttagtaaattgcttccccttttattccccagaagtttggatggtaaattatatggtcactatacacataacaaaaatggacttctcagtccatgggaattgtgtaacaaaagccccaaatgtaaacatatgtcattaagtaaagttaaaatgatagtgatggtgtttaaaaatatcgtaaatgcaaatgtttattaaatgttctaaaaatcaaaacaaaaaacctcttttgtcagggattcttgttactatgatataattcctacaggatgcttaatagcactgcccacacaatggatgtgaaataaccacctaatattttaaaatattaagtcaaaatataatggtataaaatctttataatagaatacttaaacgtttcaattaggaatttcagcttaataaaattacatgtttaaatttgtcgtattcccagctcttttaaaktaaagaaccaatcatgggccttcattttgaacattgttttaaaatcatgttaaatgtagaaaacaaataatgattaaaaacagagatattggttttaggagataagtgtttcacatttattatttaccttttttaaaagacagattatgtaaattattcttcaaatttaaatgtataggtataaaattgaataaataaaacaagttttagtaagaaaactattttcagacttaatactaaccaactattgctaatatactataaaatgctacttaggcaggttatagactccaattattatagttaatggcctcagtggcctcaccttgccttaatctaggacataaagcatgcagaactcgtaatttaattatcacctgttaatattggctctaaattcatgtctcccctttcgggatgaaactgcagtgatgagccaattaaaaatcattatcttcctactgaaaacaccagcctgctaactacaccacagtatacaaatctgctgagactttcaagaagaaacttactgcctcttacctttagggagtgctgaattaaattattttcggccatttataattctaatattttgttttaattatttatttttttgagatagggcctgtgttgcccatgctagtctcaaactcctgatctcatgcaatccttctgtctcaggctcccaagtagctgggattacaggtgctcacaaatctaatttttcacatctctagattatatgaagattgtattttttaattattacataccttaaaagccatgagagaagtggagagttatgttattctatagtaataaatggcagaaatgaaatctgtgcttttattcgtatttacatatcatgagatataaaaaaaaaatcagagaatgtggtgctataaaagggttgttagcttataaaatcccattgatatgtactagagaaatgtgcagttgatttacaggaatttattagaaactttgctctttgtgtactctcctgacattgtgtactcttgtactgaaatctaattttataattgacccatgggaatcaaactctggaaaattgatttgtgctaaccaaactcacaagagattgatttataaactagtaaatcactttttaacttactatgagaatgctacctgatccaaaaacctgaaaaatttatggtgtgtttttgagttttcgctactctcagttcaggcactatagtgaataaagaggtgaaaaacacttagtcctcatcctcaatgaatttataatctggcgagaagacttggacagcaatacatagagtacaagtcagactacaataaatgcgtgagtgatatgttgtggttaaatgtttagtagaggttttttgtttctgctaggcatactcttgtagttgggaaaccaaattatacttcagtggatatgttttaagagatatttctttcaagccattattggataataaattaactttcccttttctctgcatgtttctatataaagaatcaggaccaacagcccataattaggacacctttgctcttgaatatgctctagacactacaaaattttttaaacccttaacaagtgcagatacatgaaaagttcactcttgttgcagttattacaccagaatctttccttctgtactgtagattaattctaaagttagtgcataaggcaaaaattaaattatatgtagccaaagtgctctaaaaatttcataaatggcttatagaatacatactggttttgtaaaactgctcagtaatatacaagtataatgtttggtaaatcatgatatataataaagcatacataatccaaacaattttaaagtattctaattgcagtattttaaaggagttgtttatacaaaggaatcttaataaattaaatgtatgtgccatgtatatcctctgtcatcatactcaagtttgtagttttcttccattgagtagatttcaggtgggccactatctaacagtatatattgggatacttacctgttaaaatacaagatagattgtgttgcttttgaggagcttttctatagccagcctgttttagactttttgcgtggatttgttttgtgtggtagaagtaaggagatgatcaaggtatgatttcatgaatcacatagtttattgccatacaaagagaattttttccttaggttcctrgtgcgtaaagaaggggagaataacgtgaacagatctcasagggagtatactcgataggtaagatacgtgaaccacaaagtgagtaagttccaaaattattaaaggcgttgcycaattaggatggaagccgtcttctgtggaaaatagtctaattaaagattgaggtgtacctttttacaacctttgtaccatagaggtcaagcctatagagaaactggcttgaccaatacagtggagatctgttaccacaggtaaggtccctcaaggctgagggtggtgccagtagtggcaggcaaggcttcagagattagctggaatgatgttgccctgtggcaatgtcacagcatgtcctcttggtctttggagaacatgtagcttgccacagtctgaactctcaaagtgtctgtcaaactcttagttttatatgtattttgaagtccagtagttgaggtcagcaactcacatatgagttctgataaggtgtgatgtgacattcgcaaggggaggggtaccactgtcacattctctaggggakgagggagaaaacactccagcttcttcttatagcagaacataaatcattcacatagcaaactatgtaagtgtttggaatcatttcacagcaacataacaggattcttactagtctcaggcatccttcctagatttggatgttagtcatacttttctctaattactataktcacccaaacatacatgcagctgactggcattgggtccgtgttctgtttctgaccatggatagcttaccaacctacaaggaaatcaagcccctgacttggctgttatttgcactgtactccatcagctgagcctcagaactcatctacctgaaaaagtgataaaattgtctcatttagcaagcacactgaagcaagactagctgtgttcagcctgcatctaaaagtgtgttactctgtgacttggctcactgtaatagtaattttgaggtaattattaatgatagtgtttatggtactaactggtgcctgatcattttcacaataaggttggtattatttccatttttaggagatcaaagtttgcaggatttgcaaaagccttgatttgaaagccagtggcagagccaggccagaatgatggttttccccatctaaagtcagtcagtggtctgcttatctatgagatcatggccattataccaaatattgggaggacctggtgaaagatgcttttaggatctggcatcgaaaatgtagagctcatgctctggaatccaagagttgtaagaatttccctgttctccttaagggctgggtgactttcagcaagttactttaaacttttcaagcctcagtttatcccccttagggattttctgatagttaaatgaaataataggtaaagtgcttagcacagaacctgatatatgataagagcttagtaaatattatttgttttttaatcttgatatttagaatttcaagttttcaacagcttttatgtacatctcttatgtacatgtgtattgccaaatgaaagcctgtttttcttcctaaaaatgactagatattatataactctatagrtaatgttcttatgagggcacacataatcaccaccactcacaatacctagttttggaatcttaattattccttccataatattttcttaatctgctataatgtgagatatatgactacagctgagagatattaaaagcagaacaggaaaccacagaagtttcttaaaatraaaatacaaactgagctcagaaacatgatttttatatacatatctgaaaaagaaatgtagccagtgagcagaatatactcaaagccaaccacaaataagcagtaaaaaaaaaaaaaaaaaaaaaaatactgcagtttattttaaaattgtacacatcttgctttcattagagtatataggaatttcattataaaatacatttttaaaaatttaaaggtacatatgtgctttgactgaataattctgtgatgttgattatactctaaagtatacatgtgaagctagagttgaatatgaggtgctgccttgttcttccagactgtaatagcgtgtatgctatgtggccaaaccctgtcctctgcagagaccagcaagtcaaacccatgtttctcagagcttggttacatgagctcttggtagcacatgtacctataygtaaaatatttatagatagctctcaatttttaaaaagtaatgtacagtaaattttatgatcaccttctaattgcaagtgaattggcttytgtttttgaattgacagcttccctttgaaattcatttacttatgcttttttaaaaagtgtgttgattttaaaaatcagcatgaaaactagtatgaggatagggagaaagtacaaatgttacactcagctgactgaagttttggggactctgaactaaacagaactgtatagttgatattttaacttaaaatattacctgtttggcctacctaatttttacttgagagaaaaataacattaatacctaytttctttgtcaaatctctataacaccctttaattactacatttttagtagcagtgatttgctgacatttgtgcaacccctatgttgtgatccatatacttctcagtgactgaagtattttctttaaaattagtcctgctatatgtttatgtaaatctttgggagagggatttcttttcaaaatgctgtttgactgtcttgtgagattgaatgtctgtgatcaaagtactgaaaaatttaaaatacataattatgaagtagctcctcacatctgaagaaatgttccacagagattccaccatgtttcttcaagattatgtatttatttatttttttattttatttttttwattatactttaagttttagggtacatgtgcacattgtgcaggttagttacatatgtatacatgtgccatgctggtgcgctgcacccactaactcgtcatctagcattaggtatatcccccgatgctatccctcccccctcccccgaccccacaacagtccccagagtatgatattccccttcctgtgtccatgtgatctcattgttcaattcccacctatgagtgagaatatgcggtgtttggttttttgttcttgcgatagtttactgagaatgatgatttccartttcatccatgtccctacaaaggacatgaactcatcattttttatggctgcatagtattccatggtgtatatgtgccacattttcttaatccagtctatcattgttggacatttgggttggttccaagattatgtatttattgagttctaattttctctcggacatggtactaagacatggtgtgatgggagagagagatgttagaaagacacctctctgaggaggtgacctttacgttgaaattctgaagaaagtagggcaggtaagctctaagtagaaggaaaatatgcaaagacctagggcagaaaggagtttggtccgttagacaaactcagagtaatcctgtgcagtgggagcttagtgaatgaagggaagagaagtgagagataagtttggaaaagtgagaaggaatcagtggggcagtctttctcccagatactgtcactttatcataaattaacttagtgaaactacactagagctaaaactgttactttaccttgaatataaagggagaaaatgctaagaacatttgattactgtaaaaaaaaaaaaaaaaaccctgaaattgcgaacttctctattggaaatttaaaaaaaatcattttgttgaaattgctatactcttgtggtagtgactaaccatcactaccatcccatttcttctttattaaaaaaaaaattatttttctagagacagggtcttgctctgtcactcaggcaggagggcagtggtgcagtcctagctcactgcagcctggagctctagggctcaagcgatttttctgagcagctaggactacaggcacatgccgtgactacaggcgtgtgccgctatgcccagctgatttttaaattttttgtagagactaggttttgctatgttgctcaggctggtcttgaactctttgcctcaagtgatcctcccgcctccacctgccagtgctgggattatagacgtgagccaccggtgcccagcctcactttcttctttagcaggcctccctgccctataccttctgctcatatttaatgcataggccctacagtcagatgaaatcttcctgggaattgatttccctgaccttaattttctatagtcctgtttttacctttcgtgttctgtgcccagctctgttggaatgcttatgcacctactatcagtgactttgatctggctggaggggttctaagtccatatgctcccccttgatttagaattggattctctagtactctgtatttcaggtacagtgtaggttaagtgatttttttttgagctgccatgagatttaagcactttatgtaaaacaatttaattaggtaagtgaattccaagctctaagcactaaggtaggtagaccaagttttgaaacataactagtttataatttgggaaccgtttgagttaaactgtattttcatcttcagtagtcttgttctgtgcctcattgttagggtccacagtattgccattgatagtgttgttaatgaatagaatcttcatgcctcctgttctcctgactggaaagggcactttatttaattcttcttttctaatgaagacttttagataatcttcttataaatctgccttttgatattttttgtttttattttcccacagtatacacaatctgaagatcatattttcatctgtcttgtataggcttagaataaagttaaggtatagattagctctggattcaaatcagatggtcaggtaagatctctttctgggaaactgtggtaagaatgtgtagaaaaatattcctggcaacaaagttagaaaaactatccaaaattccaataaatctataattttcactgtccatggagaagaaaaaaatgtcatttgatcatatggcattagtttatgcaagtgtctcagaagaaggtaagttatgggtattttttcaagtatgtataggatttaatttgtttaggaaaaagcactctaaggtaatgggtgtgtgttagtcattctgtaagagctccrcattattactctgctggacctgtctgccagtaccccggctagctgaaattcaggcacatggagcatcacttatccccctgaattatgttaatattaggaagggacaaattacttaataaaagatactgtataacattttatgaatatcatttagaagtaactgctgataactttttctgtcaatgagaattactgttctttataattgtgagtctcaaattttatctatgttgacttagatgaaaataaaggagttttcttgtttgggcatggtgttgattatgttaacaatatattgttagatgctgtttcccagtgtttgaggctgctttgccccggagagtggagaaggatgtagactgagaaggtgggaggcggaatggctgcttactgtggggtctcacaaaattctgttagttggtcttcatgatctaaagattcttctccattcccccgctactttcccatccaggggattattctcgcaacccactttttaaaacagttgtttcaatttgagaagttgttaattttacttatgattgtcagtttatgattattttattaggtatattttatgaaatatcaacaaactaaggtgatttacactactcttcataattacgaatactttaatttttttttttttttttttttttgagacgaagtctcgctctgtagcccaggctggagtgcagtggcgcgatctcggctcaccgcagccaccacctatcgggttcaagcgattctcctgcctcagcctccagagtagctgggattacaggtgtgtgctactgcacctggctaatttttgtatttttagtacagagggggttttaccatgttggccaggctggtcttgaactcccaacctcgggtaatccgcccacctcagcctccgaaagtgctaggattatggggataagccaccgtgcccggccttactttaaaatcttaaacactggttttactatatgagcgtattaatggcatatttgggagagaagttgatattcatattttaaaatractccaaatttttatcttgagcgaagtagtattcactatacataatttattattttacattttctattcctaaccaaattagacattttaaaaaactctgaaaaatcacagctttgcttgtggactccattttgtgtagataattaagatccatggtttgaataccatttaggcttatcaatacaaggaaatattactccttaaacaaataactgttgtaagattgtgtctttttctgtagtttcttaatacatttaaaaacatgtgcaaaggaccagacatgaagggaatgacagtttttaaaaatcaaattgtgaaaaggttagttttttttttgtaccaaggaggtaagagtcaggaggaataaacaggtgtaaactgtaaagagcattgtaatgtacgttaaggagctttaactgaagtctaagaagagtagttgaacacttttaataagagtaacattttccagttgagttttaggaagtactggcagaaattgaataatgagtttaaaggaagaaaagtaaaagtaggaagaacagttagaatgttactgtattaatgtgggtgataattgattggatgttgttgtaggggtcagggactcagggttttaacttagtccatgtgtggataacacagttttttttttcttttttgaagtatattgcagtataaattcagctgtggacatactggatttaagttgtctaagactgatgtagaaatgttcagtgagcagttgaacacatacattagcaaaccttgaggaaaatctggcttgggaatatagatttggaatctagcaaatgatgattaaatttagagaagtagacgaaatcaacaactatatagaatgaaatagaagccgattgacttttaagagatgagcattttatccccctttttttttttctgtttaactggtaagcattgcagtggcactgcatacctttttcaatgcagatgtatattattttaggcatattatggattaaattggcatctgtyggccactctgtaaacctaattattatttatttatttggaaaagatactgaggttttttttgttttgttttgttttacaagtgttggggtgtaacttgcttgtaaatttggagcctggcaatatctgaaaatatattttcttctagagccctgcttagctcagtttttccctttctctgaagcttgatgatatatacttaatgctgtagaacttttaaactaagttattctttgttattgtaccaatatgatttttttttaggctgctgaatagggaaatagtatatccatcaatgaaatgcattatttctttaaaaaaaaaaaaggaaaaatttcagtttcatgccatataaaactattaataaattaacctcacaatttatctaagcccttaacgtgctcaaagtgatggtttgtgttttgttttgttttgtatttttggagattgctctgtgtcctgggctggggtacagtgatgcaaccatagctcactgtaaccttaaactcctgggctcaagcaatccttccaccttagccaccaaagtggttagaactacaggcatgcaccaccacacccagctaagttttttgtttgtttttggagacagggtctcactgtgtcacccagactggagtatagtgtcacgagcatggctcactacagcctygacctcctgggctcaaccagtcctcctgcctcagcctcccgagtagctgggactacaagkcatgttctgycacacccagctaatttttgtattttctgtagagttggggtttctccatgtttcccaggctggtctccaactcctggtctcaagcagtcttgccaccccagccttcaaaagtgctgggattacaggtgtgagccactgcgcctgaccttgawgtcttacactaaaaaagggagcaacatttctaccctggaaaatttgctctttggacatttgatgtaatttttattcttatttatttatttttgagatggactctcactctgwcacccaggctggagtgcagtggtgcgatcttggctcactgcaacctccacctctggggttcaagcaattctcttgcttcagcctcccgagtagctgggactacaggcacatgccagcacgcctggctaatttttgtatttttattagagacggggtttcaccatattggccaggctggtcttgaactcctgacctcgtgatccgcccacctcggcgtccaaaagtgctgggattacaggcgtgagccaccacacctggccyctggatgtaatttttaaaaccagactcatttcaaattctgtcttagtgtaatttagatttttgtgtcttgacaataatgaaaaatatttcttctttttttttctttttgagatagagtctcactttgttgcccagtctgattgcggtggcatgatctcagctcactgcaacctccatcccccaggttcaagtgattctcctgcctcagcctcccaagtagctgggaccacgggcgcacactaccacacctggccaatgaaaaatacttctaatgatggttgttaacygctttaaagaaataatttaatactttttatgatgtttgtattacattgtcctttgatttgagttgcaactgttatttacaccttctttccctgtttgcaagcgattgttttaggatcatgttcttttcagtggttttgctgtaaaggaatcacttcatttctgattattgcatttacaaaaatgattgtttcttgtcttccttgaactgtgttttatcatttgatgctgtgattcactgtgctcctaaaacatttccatctgcctgttttgtgatctttctattttagatcaccatgccacagctgcttggatagccttctgtcacctattttcaatagtgtcatatagcatcccgcatggtttcaaggatggtaaattggctagactccagggcttgctctgtaatcctgccttgtctgttaatgtcaggtgtatctcacagctgatgctgatgaaactgcttaaagaaatcagatatgatctttagcagagccaaatctcatttccatatgtgggtttaagttctgttttgatcagcttcttgagggcagagtcctcaaagtcctacatcatggaatgcaagattgtgtggtagagacaaaagtcgtagtaatttagaaaaaccatcagcttcttgtactggcttctcacagattgttgcacttgagcacattacatctgtatgctggatgaataggaagtttttcaataaaggaggacattccaaaaataggtaacagcttagcctgatacataagtggtagctgctattattgtcatcattttgtttttattattatgattgtgagaactggataaattgggaaggaaagtaaaacaaactaaattttttcaacttatttgatgcaaagctagttctaaaatcgaatagaattacaaacatttattagtgtggatcatgtctgaatgctcaggctatttatctctttaacactatttcatataagtagttgtctttaataattgtagaatgtcttarcctgtttggaatgccgtaacaaaataccataaactgggtggcttataaacaacagaaatttctttctcatttttctggaggctgggaagtccaagattgaggcactggcagatttggtgtctagtgagggtccccttccttgtttatagaacagcaccctctccgtggctcctcacagggtggaaggggcaaccaagctgcctcaagcttcttttctaagggatcctgacctcattacctcccaaaggccccacctccgaatgcaatcaggttgggggttaagatctcaacatatgaatttagcggggacacgaacattcggaccatagcagaaagtatccgtaaaggaataagaatgattacaggtagttcggttcttaaaaggcgtgagtttattctgtagatgaataataaaactgtttgtctaattggtattaccaaaccagaacaattcagctattatatttattttcatggatttatttaaatgtataatgagtttttaatatgagacaagcatattgaagtgaatttttacatattaagagccatcgtcacattattgtttgacagatactgcttttgaaagtaagctaatcagttcatttttgtcaagtattttatatactcagagtagggagtagaattttgaatttgaagtagaatgactgttttcctctgtcaatacatatggcttatattttagatttgctggccattcagttttcatacattgtgacctgttgtcagaacccatatcttcatacttggatcagaaaatacaattcctgttaatagtggtccctgctgcctgaccttctgatcagttacagtttacccaagttgctgaattagaaagcattttaaagtacctgctatttgaaaagtacctataaaggattatgaaaaagaactctatttgaggctaatatctacaaagactttctgatttcagggtaggagtagagttcaaaatgaagcaaagtttaagacgcacatatgcagatgctattagcagtacttgtttctgggaagactaaatgtagtattcctattcctgatggtttaaatagactggttatagatttctgtggttacagggcagacgttgtaatagaggctatgagattttcttcacataaagcactaagtactatttctttctttgtatttattctttagttcttttcaaaaggtgaattggattagattttgcttctatctcaggtaaatcccctactttcaacctctgcaaatttgctactcttttattgtgtctgtaaaaaccaaccttgcatgaattgtgtcccttaagtgctatgattgtgattcccttttttatctataggacacagttttctcatgtttgtcttttcttgtcatggccttttttaagtgaaatgacatatcagaaaagatcatgatgaggccccaaaatagtctggcaattttgtataaaattagtccctgttatcaatggctcatgtttctctctttctttaccatctttaattatttgtgtgtgtgtttttgctgttaggtattgttttaagcactcaaccgttgaagtgtaggtatgaagtgcctgacaggccattgaaaataaacgaagataaattacagttgtagcagaggtttcagtccttgttattcttgatatgataccctcattgtctctggcgaattcctgtagacctttaaagtggcttgtcaaattgcttaacagaattagactttttctctaatgctgctagtggggtcacatctagaattgtctttcaatgtgatctaaaaataacatactgcaaaattacagaagagacatttggatgaaaacaaccaaatgactgagaggaatagccattaaagaggacaaaaaaattcctgaaaaactgaaacttagtttcaagcaaatggaattgggccttatgctgctttttccaaaacacctgataattctcagcyacctaagaaaaattaccaaacctttttcaaagaaattaaggtctgtgctgcaatactgttctttgcagtattggctcataatcacattagggagtaaatattctaagactattagtaaataaggactgcttaagcaatatttgcctgcttctataattatattgtaattacattttatcatagacagtgaaatatgtagcaccttttgcaggtggaattctcactgctggtttgccttaaaatattggcatttggggatattctctctgctaattaatattgtttgttctcttacatctctgttcataatgagacagctctctgttagacatagagaagttatctcacttgagaaccttatgatatctatttacaagtgcatttttgtggaaatataattttaaagaatgtccgagaggttttaaagcttttattagcaccttaaaatatatgtagcattttttcattttattgcaaagctacatgttaatactctaatgctaatgaaatatttcagattattttatgcattagaaaacaatttctttgacatcagcttccattccatttatttaaatagtattttttaaaaaaaatatttggtctttgttttattaaaaacataattcaggccaggcacagtggctcacgcctgtaatcccagtactttaggaggccaaggcaggcggatcatgaggtcaggagttcaagaccagcctgaccaacatggtgaaaccccgtctctactaaaaatacaaaaattagctgggtggggcacatgcctgtaatcccagctactcaggagactgaggcaggagaatcacttgaacctgggaggtggaggttgcrgtgagccaagatcgtgccactgcactccagcctgggcgacagagcaagactccatttccaaaaaaaaaaaaaaaagaaaaagaaaaagaaaaaaacataattcagcaaaagaagcaatacacaagaggtaaacaatgacttgcctaccctggtcccacaggggcagtggcaggactgatatgaagacgcttacctcctctgccatccctacaataatctatatttttttgtcataaataaaaagagtatcacttactagggagcagatgagatcacagcctcaagcaatcctgcggagcaccacctggcagaggctggcttcctgtatttgctcaagcaagctctgtgagttgtgcttccttattgtcatggatctcttttcatggtgcatccccattcctacatttaatcacacacatctcagtcagagctctagggctttattacgaatggagttgactgctagagaggcccctccaaacttttttctgtaccgtcttccctcccaagacatctctccggggaggacattagggaaaaggaaatctggagagagtgaaaggtgcagtgctttctccaaagttctccgaagcaaccactgagtctttgaaaatcttctgatggaagaggtaagaactttagctctcatcttcaagttccttcatgtctacatcctggggggcttttgtcttattttgccctttgagctgtggttcactagtcgtggctggctttgagggggatttcacttccatcgctgccttctctttctgggcaagtcagatccactagaggggttttctgtgcttcttccccgatagagtaatgttggtaggtgcactggatacccacttcttgaggtgatgtggcaaaatcaacccttggtctgtcacagtcctgaccacccagtgcctcagttgcagttcccagttcaacacctgcaggtgcctgaacagctgcttcttcgattccagctggagaaaaagatgcaaatcaaatggaggcagttcattgcaacctggaactgctgcaccaggcaaccccagttcctcattgatctcatctcaggcaagacaagagggctcctagatgcttgaggaaacaaagttgtggtccccactcagccaccattctgggctggttgatctttcttccaggagcctgaactagtattgatgtggataagaggaagggaaatactgggtagaagtgggcagttccccagcaaaggccccacccctaagcctggaaaccgaggccctgaatgagaacagttatccctgttttccctcccaaatgttacatttttggtctgccctgcctccctccccacttatcctgtacccatattaaccccaaacctcagctggtagagacgcaaagcagctgaacatcaagaggagtcgcagcactgattgtcggagactacagatagatgtggcttaagttgagacaacatggcttcagggaaggatcaccttcttcctgcaccatcccctttccagctccccttttgctgagagccacttccactgcttaataaaatcctctgcattcatcacctttcagaccttcatgtgacctgatccttcctagatgctgaacacgaacccaggtaccaagagggcagagtgtaaaaggctgtcttcctgactctccactgagctggttaacagctgtctgcagatggcagctgctaaaagagcattaattgtaacatacccttagacagtgctgtggggccagagcccaaaagcacttctgcacctgcttgcctgtgtgctccctctcccrcaaggggtttgagctcagtggtggccaggtaagcgagccatacccctgttgcaagtcccacaaaggggtcaagggaactctcccatcttgttatcttgttgtatatgaacatgacaagaaacatcattatatctttgcttttggcgttcatgcttacctatatgtagaccacaattgtaatcattcaatttgaataaataagtaataatgtagatatacaagtttatatctgtatatataataatggttatataacaactaatacttcttcaatgcttattgtttgtttatgaaatgctatttgttttacatacattggaaacatttaatccttaaaataattctatgtggttaggtatattatcactattttgcagatgataaatctgaatccttggtttcaggatggttgtttacttacccaaagtcatacagccagccagtagcattttgtcacacttcatagttggagttcttatctacattataagttaatgattaggtaattcctagaagtcagcctaagttgccagttatattaactgctacttaaactatacatttttaaatctcagttctgtaataatagtaggtttgcaatagacttagaatgtatatgcaaaccatagttcaggaatgtggccacagtatgcctgtgtattagcacattcacttgtcatcaaaatttttgttgggcatctactatatgctggatacaggcatgatgcaaacatttaaaaatatggccactgtcacaggaggcttaaaatcttgttatgaacccagttaatgaagtgtttgcactattatgcatttggatttttagttgactcattaaaataaactaaataaattaataaataaattamattcaggtatttcttgccatctgattttcttttgtttcctaagcttatatactgagagatactgcattaaccgcatatttttggcttctgaaatttgaagagccagtagcagtgaaagcttgaagagccagagaaaacagcctcatctcagagagtttattcttgagtttgggtagtgtgagttcagttagggagagtttggattgtgagggatgtgtatatcatgtcttaaaatagtatatcaataataaatagaacgaaagggtgatttaagacgttattacccctccaccattgttctattatgtacccattgaatataaagatattcctcaggaatatctattcctctccaaaaataattgtcacagtaatttaataactgaattttgtatacatcttaatgttctgtttgtgctggcttacatatatgtaagtaaaatggtttatcatgttttaatacccaagtattgggtattagaagaattgaaagattatctacataacaagagtgtatagtcttgaaaaagtggagtctgttatgcattatgcttagacagatggcagaatggaaagccctcttttaaaatcagcttttatagtatggcctagcgaataatatataacattatgctagcacactcaaccaatttgtttactcattcactcaacaaattgagtgcctgatatgcatgagactgtgtaaactgtatctgcttggtgcctggcccctggagattaaaatccagttgagttttctactattcaagagatagtatttgtagtctggaaacaagtagcttgggtttgcattctggctcttctacttactagctgcttagccttgggtgaactgttgaacctctttatttctcagtttcctcttatagtttaaaaaaaaacaaaacaggaagaagargagggagggggatgatattaagagcatctaccttatggagttttatgatgttaataaacaaatgtatggagagttttagaacagaatattgcatggtctaattagagcagaatattacctagttaattaaataaacaaatatatgaagaagttttagagcagaatattgcctagtaaaatgttagctctttttattattttaatgtggagacagatgcttagaaaaactgcacgttaagaggttctgggcttagtccagaagggtcaagaatgactttccttgagatatgatatgggtctgagaagtgaaagatgaataatattgacagattgagaagagagaggagtagagtaagaaaatcccaggctgagaacagcaagtctgaaggccaggaaggggcaagtcagagtggctgaggacaagtataggccacaagtgctaagtgaggatgcggcagaagtggcgatggaggccaaatcttacagagccttgggaagcctgtgaaggaagattatcrtaaaagcaagaaagtgacacaatcagattctcatcttacagagatccctctacatgcgttctgcaaaatgtatgtggggagcacaaccagatggctgttgaaggtaaaagatgatagcttggactaaggtgggaaacagatagaagtggataaatcaaattatatttaggggataaaatagacatgacttaatgatttattggataagaagtatgagggagaggaactgtctgtgaagactcccaaaagtatcagatagatgacaaatagattacagataagtcaggaaagtgagggaatgtcctaagaagatgctcaggatatatgagagtttgctgataagaagtttagagcagtgattctcaagatgtggtcgctggaccagcagcatcagtatcacctgggtgcttgttagacttgtaaattatcaggtcctgccctggatttatagagtcagaaaccctgggtgtgatgtctccctaatctgtgttttaacaagtttgcatgtgatttgaatgcacagtaaagtttgagaaccactgttttagaggcacggtggaaaagttgaggaagagggacaaatgaatgttagagtcaagccaaggacttaattttatgaaacaataatgctttcacataggggtcagcaaactgtagccagtgggccacatctggccgactacctgtttttggacagtccacaagctaaaaatggcttttacagtttttttaatggttaaaaaaatcaaatgactattatatgacacatgaaaatgatatgaaattcacattttaatattcataaagttgtatcgggacacatttgcacttactcacttacatattgcctacatctgcttttgtactacaatgcaagagttgaatagttctgacaaaaagtacacaaggctgaaaattctatctagccctttatagaaaaatattgctaacacctgccttagagcattactgtatttgttgactgatgaaaacagaaaaaagcagcatggggagtttaatactctggtctgtaggcagaggatggactgtgtgcataatggacagatgtctaagcttgcttggtttggaaagatgcgtgcaaacagcatggtccttgttttctgccgtatgtgggcctgcagtcccagaacacgcaattttgcctaagatagtaatttacctggttctttttgtaacaagttttggagagagagtttttatgaaaatggatcaatatttattttatacagtgatgttttatcaacagtgttgaaagtacgttgtgtaaaaatattgtatatttttacgaaattgtgtaaatggtctgctgaggtcctcaagcatgttcaccatgagtatgactttacagtttgctgggtaacgttcagccttatcatgggaaaaaagtgaactttggaaattcttgcttttggtaatggtggatgagcttgttatagaccgtgcttcctgccaagaacaactagaaaaactgaggaagacaaaatctgtttgatggcagtgaggacttgaggtatcaggattctagagaaggaagtacagagggagagactcaactctgtccctaccgttaatcctcagtcattcgctaattctcagcagtagctaagaatctgagcagaactctggtactgttctggagccagaggttaaaaattggaatccagagattgctaagaaggagtggtccaggtaaacagccaggttttcatttcgatccccaaaaggtagaacagcactcagaaggtgttctacctttgaatagccagctttcagtccactcaattcttgattggaataaggtgatctgccagagtattgctttgattttgctattgttacacyagcctctaaatcagcaaagctattgagcccaataattaagtcctctgtgtggaccctaggaataataatcaaaccagtggggaggaaaagccctcctcttctgaaatagcagaacaggaagagaaagatcattttctacttcttgtgtcatggaggttaaaggtgggaagcccataagaagcctgagacttggtcagaaggaggagcggctctttgtatagatgaacgtgttgagaaccacctttatccctcacagcttccatcttaaaatgtatttagaactacctttatccctcacagctttcctcttaaaaagcagccaaacaacagaaaatccatccaggtctggattctagtaaagtcatttccggataccaactaggtcgctttgaggtggagtttcagcacctaaaaatcccctgctttgcagtgaagggtaagatgagagaaacaggcaattggagtcattctgttttttcctttttgttccagggtagttacatgtacttaatttgtttgaaacatgcaagtagattatggaacattaatataagctgtctataagttatccaacctatccgagaagcattcaacagtagtcactgtgtatttgggtgaattagaatataattgacttctctagtagacttttgagctgagttcatccttctggtttgttgactcctcacctggttctctatcgaattcatattttggaagtcatacctctttttttattgttagtttttaagggtgaatccagaatcttctttaatttctaatgctaacaagggcatagtcttaagttttctgtttactttattctgaactgcaaaactaggaaggagaatckgggtataagtgctctctgttctgtcagctcacatgcttcgtagcataagcaggtgtgtgatgattatttcagagcaaaaggaaagacttagtaaaatttgtatgtatgtattcaatttgattatagcttcactaaatatacaagtgaatataatgaaatggaatttcatgcaactcaattaaattagcttctttaccaccatattaattatccwaattttattaatttgaaatattttcttacattgttactttaacaacaaatgcgtcttcaaattaatcatctcttctgtgtattgaagaatagttcttttgattgttgtgctctttaagactttttaatgcattttctatatttagttatttcacaaattagtataatggctataattataataatttcttctagtatatggcagaacttaattttgcctatgaatttgtaaacatttccagaagatagaatatcttaagaatggatttaaaatttgggatttgggccaggatcaaagttcttgacctcatagtttcaagcatttattttttatatatatatatatgtatatatatacgtrtatatatatatagcattttattttatctatataaaataaaaaattatatatgtatgtatatgtgtatagtatatatacgtgtacrtacactgtatacgtcgtatacatacatgtatatacacatacatacatatacatatacagacacacacatatatatataatttccaaacaggctttactaaaccccctgaggtctcatgacacagtagaaaatcatgatttagtagaaagagcatggtcgtaggaatccagtagatcagtagacctgagttagagtcccaaatctgccactttcaatctgtatggcctcaggcaagttacttaacctttctgtctctctgtttctttataaaatggagataataatagtaacttcttcataggagtaaataacataatacagggataaataacataaaatacaacaacgtttgactcatagtgagcactcaataaatgttgttattcttcttaagaacaaaaaaaatatgatttttattacttcatccctgctgtagccaagcattatgcaggacaggggggatgtggtcacaaaccaatgtgggtggacaagtgggagctagaaaggtgaacaatagagtgtgatacctgctttaagtagagacttgtgcaatgtgctggctcttgtgagaagtggctaactcccattacatcatttcctcttcctgacacttttccagtgtatgattatgcccatttacagatccagagagggttataattgaaacatcagtcctcagacccctaatcttgtcatatatgatcgatcgtgctacagttctatagtgaatgaatgccaggtaaaataaacagctttttgagcacttactaagcatttaaagcattttctcactttttgtgggagaatacagaggaattggaagacctagttgtcatcaagaagcttacagatatgggatggctaaataaaaaagtcaattcagattgtatgacaagatagtgactacagataactactaataagtaattactggtaaacttttgaacaattttgaaaattgtgaacaataacacttagaaaaatggagatgaataaatgtactgcataatgagttattataaagtgaacatccattaactgccacccaggttgtaaaataggacattgccagcttcccccctccaagaaatctcccacattccctttcccaatcataaccacttcttttctcccataggtaaccactgtttgttataatcacttcctggattttctttatagttttaccatctcaatacatgggatcatataccrtctacattttggtgtctggcttctttgttggacattaagtttttaagatttatccatgttgtagggaactgtaatttgttcattttctttgaagtagtattccatttataactatagcacatttatctatttcactgttggtgaacattttaatataatggtttttttaagctccagactccaggagatgcctgtttcttttttcattctcagacattgttactttcgttcagttgmagatgtcacacatacctattcccttgtgtagagtgaaaactaatttctccctaattctttctagaatgataaatactatcatttttctcctcggtctgttatatagccacttcttacaatgttgatttctattgttcagttgaactcraaagaaacttggggccaggygcggtggctcacacctgtaatcccagcactttgggaggccaaggctggtggatcacctgaggtcaggagttcgagaccagcctggccaacatggtgaaaccctgtctctactaaaaatacaaaatttagccaggtttggtggtgggcgcctgcgatcccagctactcaggagggtgaggcaagagaatcacttgaacctgggaggcagaggtttcagtgagctgagatggcaccactgcactccattctggacagcagagcaagactccatctcaaaaaaaaaaaaaamaaaaaaaaacttggaaagtgggattccttaacacctttggatttttccaaagtaatcactatgttttggaatgtctaatctcatcatcttggtctttttgctctgcccagctttgggaatggctggcttatcatgaagagcctaagaattctgattttaagggaaatatcatagtgataacttgtggtgggaaaagttagaagacagatgttttccatgaatacttgtggagaactgagtatacattataggtatgtatattaaaggaatgtgtgtcttaagtgaacatttcatcttaactccatgttgatgtcaaaatgatactttacttaggtagtttttactttgttaccagtagtgtaagtattctgaaactgttagaaattgtttctctgcctggaaatttcaagaaattcggaagacagggttttatagcagtgccttcacatgggggatgcatcttatttctttataatgatctgggtttaaaccttgaaatcaagtcccagaaacacaaactttatgaatcaaatacttattataaatattaatgtaattgtcagaaaactggtagaataagaactttttcttagataaaaataaaaactgtgtgtgttgaatttgaaattagtcgccctttatacgtggggatatgttccaagaccccagtggatgcctgaaacctcagatagtaccaaacttcattgctgtcggttgaaacacatttctcatgtcttccactcatgtatttaatgccttttccatcttaactaataggcatttatcacgtttctttttccttctttataatttcatagatagaacatcrtttcttaccatagtaacctcagcgtaggatttttcctttcctgttcaagttaagaacgttyatcttttcacttaaagaaagcagtttatgccttctctttggcatatttaaattgccagcatcatttgcactttggggctattattaaataaaataagagttacttgaacacaacactgagatatcctgataactgagatctggtaactgagatggctgcctaagtgactaaagggcagatagtgtacacaaygtagatgcactgggcaaggggatgatttacgtcctgtatgggctggagtagggtggtaggaggtttcatcatgctactcaaaatggtgtgcagttaggttggtacaaaagtaattgtggttttgccattttaatgacaaaaatcacaattacttttgcactaaattagtatatgaactgtttatttctggaatttttcatttaatatttttgggctacagttgacctcaggcaactaaaacctcagaaagggaaattgtggataagrgaaggactactataaaatgaaatttaaacatttagcatgtaaccaatttaaatatttacaaaatcgtatggacaactcagttttcttttcctgctcaacaatacyttacattataatgtactgtttatcatttgcatcatgaaacatttttattcacattaatatattgctagtgtggaaatggaagaagaaaacagttgatgtcagactcttcctcacttttgctgaagggattgcatctttatttggcatttgagttgagaattgtgctccttactactacgcaggaggccacttttaactgctcccttctcttgaacattacaatactttagagcatgaaaaaagcaaactatctctatgtgaactattactactccactgataaaatgctgaaagaaatattaccgtcatatacaagtctaaaaaaaattgctgcrgataaagtcttatgaaactccattaatgtagtttcacagggattcttagcttatagcttacaaaataaaaaggattgtcaaaataccaagcttggaaaatcatgttcctgttatagaaaacataaacattcctacagrctmgaattcttaccaatttctttgtctaattaaccacattctgtcataacggaaaacggataaaaaggaatgaagctagccttttattttattttctgttttgagttggggtctttctatgttggtcaggctgctcttgaactcctgggctcaagtgatcctcttgcctcagcctcctgagtagctgggactacaggtgcatgccactgtgcccagctctgcccatttaatgtattgatgaggaaaaatagtagtggatgagtttgtgcattctgtgaataggagcatatggtcagcagttacttctcaaagttcatcctaagatctacaggtggacagagaggagaataaatgaaacacacacacacacacacacacacacacacacacatctcaggcctttcagtactataattaagtacaggaattcatttattatccacttaaatagaaagccacattccctatcaaattacagtagcctttaaagcttcaaattcactttttaataggccagacttccttccctcccttttttcatcctctcctcctttctccttccttccctccttctttccttcttctaccagtatttattgggtacttaaggctattctgggtactagggatacagctgtgaacaagttagttttcaatgagtttatgtttgagtttgaagagacaggctgtaatcaaacaaataaataagaaaataatcagatgtgaagatgtgctctgtagataattaaaatggaattctgctaaagaatgactggtatgttcctttagaatggttgactagggaaggcctttctcagatggttatatttaagctatgggcttgagtgtcttagaaggaatcatcatgttactgtctctgggaagaacattctaggctaaggaaccagctagtgcagaaggcaggaacccactttgcccaccaggtaacaggagaaagatcaagamgctagtagagtatggtgaaaaggtaagtctagagaaatgagcaggagttagaatacaaaacactttggaggctaagaattatggatgaaaagaaaacaagaataatgtagcagctactggttattgactcactttatgccaaatactataagcacattaccttacaatctttaattctcacatttgcttaggttagtgttgtcacccccacgattcaggtgagaaaaccaaaactcagaatccgtttgctcaagatcaccttgtatgtgaaaaggtaaaaacgtgggattttatttgcgctcttgtctgatggccttcaaaacctgtgctcccaacttactatgctgtaaagaagctatatcgttctaactttctcctcctgtcccattcttcccttaattaatatcttcttcaattatattggtcctgggacatagccagagaacttcattatatatacatatgtataaatatatatttttaggtggagtcttgctctgtcgcctaggctgtagtccagtggccctattttggctcactgcaacctctgcctcctgggttcaagcagttctcctatctcagcctcccgagtagcttgggactacaggcatgcaccaccatgcctggctactttttttttttttttttttttttttgtgagatggagtctcgctgtgtcacccaggctggagtgcagtggggcatctcagctctctgcaacctctacctcctgggttcaagcaattctcctgtctcagcctcccgaatagctgggattacaggcgtgcactaccacgcccggctaatttgtgtatttttagtagaaatgaggtttcaccatgttggccaggctggtmtagaactcctgacaggtgatccacctgcctcagcctcccaaagtgctgggattacaggcgtgagccaccgygcccgaccccaatcttatatttggttttatttctcccatttgtctctctaaatcccttagttgataagttaattacactatctttgtttgaaaagaatataaacttagaacaagactagaacattatgaaacaacttccacgtaatgtcacaccaggacaagttattatcaagtgatcttacrtgatagtcactagtacttcaggagataagtttgccggaggaagtatatcaacaatttactaaaaaaccattttggccagaatggtttcaaagtttttagttccattaaaaactagtggacatttcccaaaaactagtactagatgagtgtcagrgttgattaaagtttagaaattgttttaagaactttaattcagctgatatttagttgctagcccacatgtcctgaagattttcaaccatctttggtttggaaattatttgcaaataacatatgatcaccttttattaggtatttagaaaaaataacttcatctgacatttgtctctaggtatatggttgtgatgtcatcagggttacaatacaataaatactctagttatatgttttaaataggaatatatagcagtagtacaaagtctcatttttatttcagtaacttttcagaatgttgccatctgatctagctcaagacccttagtttgtgacactcacttgaatacttaggaaaagtctatggctttgatctgatgcctgtttgggcatcaaaccagagatgtggttgagtcccaaccagagtttaaccacagctcaaccacccttgacatcctttgacataccttaagctttatgggccaaaggctgcttgaggaggggagtacatggcagcctcaggggcagattgagtgctgcttttagaaactgagggacaggctgatctgcctagaatatattggatcttgctatgtaaatggtttgtatacattcagaatcaaattaacaaaagataaaaaagactwgtgaaattgaaattatttgacttcttgaacaaatataattatttttgcacagttaccactagtactttgcaatacttgatctaagcattcaaacaccacccctgtgggcagaattttatggacactgcagtgactgtcaaaaacatgaaaatttcacatcttcccaacattttcagtttcacttctccattaatagtcactaccttatttttaaaatcaaaccttgtgttgtgtttagctgtttgtaaattgcctacgtcaaacgatacaacactctattggaaagttctttgttggttctgaatatacatacttggcttttcatggaataatgctgcagccacataacagaactctgtcatcagtgttttaaatcctgagtgattatatgcattaaatgtcattgtaggggctgggcacagtggctcatgcctgtaatcccagcacttagggaggccaaggcgagtggatcacccaaggtcaggagttcaagaccagcctggtcaacatggtgaaacccggtctctattttcaaaaatgcaaaaattagctggatgtggtggtgcacgcctgtagttccagctactcaggaggctgaggyttgagaattgcttgaacccgggaggtggaggttgcagtgagccgagattgcmtgggcgacaaagtgagattccgtctccaaaaaaaaaaaaaaaaaagccattgtaggatagtagtaattttaaaaacatagaggacaaacaaaaagtactttctacttcaatccaagatgaagaattaaccatgtcagtaacgaaaaggtggaccattgcagcatctgtcattattgtttctcattttgccttcttcttcctgtcttctccccattgccrtctcattttctctgcagccatgagcaggaactgtatgcaaagtacaaaagactgtattcctgaaacagaacttgttgaccccattttcttgactcttatttgacattgctttctaagagaagggttttggattacacactcacacacacacacatatgtacacattcatagtaataaatgtatttatcaactcagttgcaatgagattctgcttgttggaatatcatataataaatagctatattggtatttattgaacattggctttttatatgactgcaataagatttgatgctagtatttttaactgttgctccctctctgcctccatgcttagctgtttaacatgacattcattcatcaaaaataaatgtccaagtcaatggagtgtttctgtaacagatattagtcaccttaracttgttactcatagcccataaactcttatcattctttctcagataacccagttgaccctacattagtagaaattgagagctctgagttcatttttgttgttatttgatgaatatatcacttggctgactattaggaatgtagcatttggaattgtataagtaacaggttaagactgtgtactgatttcctttttaaaaattctgttttatgagtttgtttatagcaacacaaagtaccttctttttgcatagctttttgttcatcagcattttttgcaattttaaaaagcatgatttttatgcttcatatttaaaataatcgctaactgtagcgtttaaatatttgccaatgtatgtctgtctgtacttaatactcctatggcaacaggcagagagaatttgcctagaaatttccatcacttttctgcactgtcaaattatattatgcagttacaagtatattgaatacagggaaatctgagatacaagtagttaacacattctatttcccactactctgttcagttcagccacttcgttagcattctgaaatttggcttatatactttgactcagatgcgaaggtgtttttctgatactgaaatgtgtggaacaaagctggaatttaattgacagttgctgctgctgtaatcagtgaatttttgaaaaatacagcaacagtttgctgtacaatatttttgggtttgctttcattttaagatttttacacatgggaagtcatgcgaaacagtataatgtggtagaccattgtaggtttgaattccaaatatgtctcttagctttttacacttggtcaaagcatttatgcctctgagcctttgtatcattttttaaaaaatgccagtgatacacctgcctcactgattgtaagaatgaaatgaggttatgtaaaacaactaacacagtgcctaatgctttcatttagtcttgaagtcccagagcttgttagtggcagagcctgaaaagccagctcttctgacacacagaagtactttctcaaccatggcacactgtctattatttttggttagtagggagtatgagtactggcagatggttatgcagagctatgacttttttcaggtaatttttccccataraattttattagggattttcctcaagaattctaaaaagtcactcaaagtcaggtgaaaagtgaggggaggagtatagaggtgtccaggcttttgactgggtgattgaagataatggggccatccactgaaatctgaagcacaggaggaagagaagcagttctagtgagatggcaagttcatttaccacactctttaacattttgtttagttttaacctttatttatggataataaaggttaatattaataatgatttattttaaggcattcccaaatttgcataattctccttttggagatacccttttatctccagtgcaagtctggatcaaartgatagaaattccatgcagtgctatctctgatgccatgaattggtcactaagaagaattgacttttccattgagtttcccataactagggccaagttaaaatctcagccttttctaatgacatttttctccatgaagatcttctcagttgtgaagaatatgtgtttgttaaaaagtaaatgaaaaattaaaacaatagcctgagtataaaactgggttacttaaaagtacttgtagttttacattgactgcctggaasgcagaattataaagtaaaagacagtgttagacaatmtttccaaggctctccagtttgtaaagatttgttaatggatctcccagttcccttcctgtttctttctcttgctgccttccttttctgattctctttttctctttcttttttatttccacaaataatgcagcatactggaaagggcaggtcaggacagcctaggttcagaatctggctttcacatactacttgtatgacctcgaactgatatgtttaactctttgaccaaacctccatttgccagtctgtaaaatcgcaagactaatacctaccctaatgaggttattgggaaaaatgagaaaacagatttaaagaactcatctagttagtaagtagtagtttttaatattgttgttatgtatccgcttgaaactgtagagagaaataagacatagtaaaacttaaataagtaaatgtagtgatttatgggttcctaggtggaaagattttggttaaagagaagattgaaactaatagttaaaatgggttttctaaaagattatctttgaggttatccctcttaaccttgtgttctgtgaccatgacaattgactgtaaggaagatggaatgaggaaacaattctcctgccaacataaagaaaatctgtatgcccagaggcatgcatatccagccgtgttggagaaagtgctttaaaattcagccagcaacacttgatacctccctattgatgaattgcttgctaaactgtgccacagagtattcaacttaattcacttagctctcttggcacagcttctttatgaagtcagtgtcccccatgaggagggcaggggctggggtgtggaagggtccacaggaaagcccattccaaattgtaaagcaatcatatttggtgatacttttaattcattggattattcccttccccagttccccaagtattttggagacaaatttttcttcagcttcacatgttgaagatattctccaaagatgtcatcaagaaggtatagtctccctttttctcttgagaaccctgactttcagaatggcctggaaaaaaaaaaggtcttgaccactgtgcaggtgagcatcaagctttacacatttttttccccattttttttctggaaagaataaaaagattcagatgacatctgakacaacctggtataaacagccctagtctagctgctacacagctgcttagttctggttctgtgaccttagctaagatcccagtgtccacaaatgtaaatgatatattgacatcttgacatcttgattaattggagggttttttctgaaatattttaaacttttaattctgaaaatgttcaaacatacacaaatgtaaagaattgatcccctgctcccgtactcatccctcttctttcactaccgtcaacatttgctacatcctttatctcctctgcgcccctccctctactttttatggtttgtatgtttgttttgggaggagtgcatgtgtgtgtgtttgtgtgtgcrtgcgtgcatgtgtgtgtgtgtgtgtgtgtgtgtgtgtgtgtgtgtgtgtgtagtatttcagagaaaatcccaggctttatgccgttttactcctaaacctctgtacatctcaaataaaacctaaaactttgaggtctgttacctctgcctctgcttacccttctgggaaatagttaccaataatataggaaatataaaaaattctgtttcccaaagatttctgattctgtaatagtcctgtttcagtaattcttaatttgaagtttatagaaattagtgggtattggaaccttctgaaatgaaatacagrtacttacctttatgtgtaattgtgcttctggtgggggcgggggagatgggcttttattaaaaaatacaatgtcactgaagtaaataaaacttttaatgaagaatttattaaaaaatacactagcacatcatgatagtgtttttgtagaagaaaagtaagctgtgtctaattctgtatttagtaagccaaagccatttagatattaaatacatgctttacacaggttttttagaaaagaataagttcacttatttagagttaggtatatttatggcctcaagataaagttgttagtctcttacagtgtctgtaaagaaataagacttttctccttttttttgtgctaatgaaatgtttccaaaggacattcattttagtattgacttgggtttgataatttatttgtttaaaatttgatataatttatctagaaaatctttaaatctggatcacactgggcatctaaacctttaaattaaaatacatsctgcaactttggtcctgcagcagtttttctcagtagagaatgaggaattagcttaaagctggtaagtgtgccaaccctaggttaaagctttacatctgttaaagtatatgactctgatgactggctcctggaggtcataaatcttcttgctaagatatataggacctgaatttgaagtgaacttttggcaatttaacaccagagttggaaattagactagtgaagatggtaaaagctgctgctccctggagcagctctgagctggccctcataggctatccataagtgtcacgattcacaaaaaactagcagagtttttccagtactgtagtttaatttttgtttcttttgggagtatacttgttacttggagtattggtttatcatttgtcagtttttgttcttttgccttaccttgatttagtatcaaacatgagcaaatgcacagggttgtattagcctttgagttttatgtgactcaaagaagagcccttgtatttgaataatgcttaattcctacttctgtgggatgttattaaatatgagtacccacagtatccaaagcagattattaatgattattacaccatgacaagggtggttctcatcatacttcataattaaagaggatgattctgatggcattgttgggctacattcctgaccattggctttactttctcaggaataatagaatgtggattgtgttgccattcctttctgccatgtgccttgggatgaatgtagatagacaactgtgaaaagatcagtttttaaaaattcaacacaacatcactaaagcagaaaaagcagagtgttacacagttagctcttagaaaacaggtatttgggtcacagaaagaaaacgttccatggctgtgatgtaatgccaaaccaaagtcagcgtattttcaggtacacacaaaataatcaagtattaatatgatgtacaaagaacataggaaccctttgggtagaaacttctagatgtaacctcatgactactgcctgattatcatgctcttactgagtaggagaagacaatgtgtggtttctccttccagtgaaatgtataccccatatatttcccctgtaattataaaaggcaactgagaaaatggatgttgtaattacttctgtattttgcattctttgtactattactgatgtgtgttcttccttaagaatctgtattaatttcccaggcctgctgtaacaaattacacaaaataggtggcttaaaacaaaagaaatttattctcttgcagttccagaggctagaagtctgaaatcaaggtatcaacagggccatcaatgggtccctcagaaagctctgtggaaaaatcctttcttgcctcttcctgtcttctggtggctgctagaagtccttagagttttttagcttgtattggtgttactccaatctctgtctctgtcatcacacagcctttttccctgtgctgtgtgtctctgattccaaatactgtcatcttttctcttatacagtcaccagttactggatgtagagcccactgtgatttactgtgacctcatcttaattataccttaattacctgttttcaaataagatcacatttgtgagttctgggggttaagacttgaacatatctttttgagggacacagttcaacccagtatagaggccatggtcatgggtaagcaggaggataagttttcagtgtagatttggagttatggttttggtataatactattaacctgttaatcacagaatttaaaagtgtctgtcaattatctgaaaatataatgggaactcttgttaagtgagggatgattccactttgtgtagaatattttatttgcttagtttctcttcctctgcagcatttaaacaacagttttaacctttaggctatcttttcttgattttcctcttttaaatttttcattgctcgcatacttgagatagatttcaagccttagagcacatactctcatgtgttgagagtaaagatagagtgagagagaacttagctgtaaaccctatttagcatacatataaagtaacgaggcatgtttttatgaatgttctaataagccttgcagtttattatgaggattagggttgaataatgttattataaagtgtgtatgtagtaccttcatcttttctactaattttattcccgaaataaccctgygaaattagaatatgtattatctgcccttaaaagatggaaaaacaagtgtatgtagaagtagtatgaatcctgtccagtgtacaaagtggagatatatgtaaataaggtaaaagcagaaaacatcaaatgtcccctactctcaagacatttataactgaatgcagggtgcagacaagttaacaagcaattctgtctgatgtaatataacagcagaagtgtctgtaaggtgttttgatagcaaatgggcatgggagaagatgacagaaaaagaagcaaaacgcttgaaaaacacttaaagaagcgacagactttctccttactttttccctttttttctcatcccctcctctccctcctcaaactagggtatagtttgtaaattttttaaagttcattgaacaaattaaaaaaagagaatgataactgcagaatactataatgtgctctggaagatcaggtgcaaatatttcacatcacagaacaaaaacattaggaaagggcaagacaatgtctgttccaggcctaaggaaaagcaggattcaggcagcaygctcttccgcctcagttgaggctgtgggttgagccctctctgctcctgaactgttgataaaagtcagggtcagcaaagtcagaagcagtttggctgatgattgggagtcacttgcggttgggaagattggaccctgtaggggtctagagacctgtgctctagatgatgcctccacatctgctggtctttgtttcaggcttctagactttggggagaaaagcaagccttctcctttactctgatggtcctttgcctcttgcctgatgacaagtaaaatgaaactccactcctcttctttctcttagagatctcaggataattcgagacctcacctgtctatcttgggttattgaggacctcctgagaggagcgaggaggttttgggggttgaggtcaaatttatatgtgctaaattaaacattttaaatttctcaatattacaactttaaaatactccaataatttcttcgtctataattgtatgtcaaaagcatgataaaaatgccctagttgtctactggatagcaatatcatcttaggcaagctacctaaattctcattggctcatttccttcaactagaacgttgagattgagagtctgtgaaaattaagtacttagtgtagtacatactaccttctaagggttcagtgattgttagctattgttataattattatgtgtgatgatttggtcagtttatgaagatctttgacacatatttattaaccatgagttattaaaattaatagttctaattgcagtacaaaygaaatcacagttgcttgtctacaatgtatrtaagtgtagagagaagtagagttaattgcatactgactggtcataaaattagctgctctgataattaagattcttgtgcaagcaacacttagatgacagtrtggaccccatatctagccaactgagtacaaggaaaagtagaaagctccccccaagatggtgcagaattagttaccagttataatcccatatttaaataggatgtaataattaatgtatgtaaatgtagaccatagtcgatgaaatgcattgtaattatttgtaattttcattttcactgtcttaaaacgtatttgtgtttttaaagaaaagatagttgtccttgttaaaaattattttgccttatgaaggaccttgtttgtatactagatcattttggaaaggtaaagttaartttcgtagtagtgacagcagcaagactaaattggtttcagagcactttcaaaggtgcagcgctctttgcagttgatgtttcctgctaagcatttttgaagagctaaaactattgagccactctttgtgaagttagaggtaggctgctagtagaattcctactggttagtagaacagtaaattcaaacaggttggaatgccagttcttcaagatgtttggaaaatgcagttcaactcagamacaggacttaaattaaatttggacacctgattattattaccttagttaagagttcagaaacaactcttctttcctcatgcytttattcaagtacactgacaacatactttagtgcagtggttytcaaggtatggtttaaggaccccagcatcaccattgcctgggaacttgttaggaatgtaaatcctcaggcctcaccccacatttacagaattaacaactttgagtggggagccagaaccttgtgtttaacaagccttcctggtgaatcygatgcagctaaagcattatcattcctttttataattgttggcccttacccaatttaaggcaaatttcaagaaaaaactgacaacctaaagaagtattgtgtcatagatggggaaccaagatgcttattgaaagacacaggaaggggaacatcacactccggggacagttttggggtggggggakgggggaggaatagcattaggagatatacctaatgctaaatgaggagttaatgggtgcagcacaccaacatggcacatgtatacatatgtaacaagcctgcacattgtgcacatgtaccctaaaacttaaagtatartaataataaaattaaaaaaaaaatctgagaaaaaaaagttaatttaaactttagcacatcgtatggttaacactaggtaaaatttcccttttgaagtcactaatrtgaaatacataccacatttgttttctgcagcagtagagctaatatactttgacctttttttcccaaatgatactttataagtcttcaggggagagattgaaagtattaaatttcaagttacaaccatcatcattaagatcagctcagccttaatcttttggccttgtccctgcctttccctgcagtgccccagccagtctgtactttatttccttcagcttctaatgttttttcttcacttttggtgtaaaagattctcctctctctgcctggaaccactccttggccccactcttccccttggcaagctcattctttaggttttagcttagacatcactttcttgaagtaaatttcccttaccttctctgtgttcccacagacccttatgcttcctctttcctaacgtcatccactagagagtaattgcctgtattttgttctctaggccctaatacacggtaagctctataaggtcagggatgctcccaggctaccagcactgcacctggtacatgtcaggcatccagtgcatacctgatgagttgaacaaatgaggaatcattccactacgtaactagcaactaagcattcaagagatcagtatgaatgcatatatttatcgttattactatatatctgtatatcttggtttttacatttgttccttcttttgtatgtttggagaataaaatcctttataactcactgcatcccttccttaggaactcttaatacatctgcctcatcccatttatctgtgtcttgaaagggaataaacaggacccaaayggtagattatcccaatgtacaacaattcagcatgagaaattccatgttaatgacattgttacagtataaaagaaccttttaaatctgagacttggttttataaatcctgtaattaaccttacagagaaccatattggtccattttttccagttgtcaagagagaccccactggctggagacattcaatctaccttactctgtttccagtgagtgaaaatatcttcatctgtctatgtgagctggtgcacacttgttaaaggtcctgacatagtgcttggtatactgtaagtggtaaataaataagaattgcttcccttccctcatttgagctttcagaaacagggatggtggtaaaccgttcatgaaggatccacctccacaatcgagtcaccrcctaccaggccccacctccaacaatggggattacagttgaacatgagatttgggtggggacacagattcaaactatatcacattscartggtaggatcaggtaactttctagtgtgatcagtcatcaggatcttctgctaatttggaggaggatgctatgatatgtgtctcctcaaaattcttaygttgaaatctcatccccagcgcaataatattaagaggtgaggcctttacaaagtgattaggtcatgaaagtggagctgtgataagtgggattagtgcccttataaaagaggctgaggaagcttgtttgtctcttccaccatatgagaacacgtaaggtgccatctgtgaggaacaggcctcaccacatacagaatctgctcatgtcttgatcttggactacctaaccttcagaactgtgaaaaataaatttctgttgtttataaagtacccagtctaaggtgtagcagccgaaatggagttagagtgtttggtgtgagaacaagacatgaagactttcatgattttgtgtgcaactcaagaggtgtgaagctactggacttgctagatagttctccttccatacaaggttggggaacttgtaagatatttctgggtgtcacacattttgaatgtcctttacttccactgataaaatttatttctaactttttttatgcgtatagatgaacttttccttggtaatgcaggtaaagatattagatgcaggtaaaaacactggattcctctggagttaaaaatcctgattaaagtccttcacatactaactagccattcctggagtgataaatcctaactaggtccttccagtgataccttgcacacagagatacatcctatgtctgtatcagtatttttcttcaaattgcaactctgatccatcagtggsttgtaaaatcaaattagcgagaccaacatcctttgctaccatagtataggatgggaagggtatggaatgaggctggagtacattacatgtaawaaattgttttttgaacctttccttcctgttatacatgtacacatcattgtgtagtgctgtaaaatgcatttcttactgtgggtcgtggagaaaaatgyttgaaatcagcagttagtttttaaagtagattacaggtgatgtacatctaaaaatttagccaattctaggattataatggtttggaatttgctgactttttgtaggtcatatcagtaaataaaacccttttccatatttctgaaattatattcttcttttttattattattatactttaagttccrggatacatgtgcagaacgtgcaggtttgttacataggtgtacacgtgccatggtggtttgctgcacccatcaacccatcatctacattaggtatttctcctaatgctatccctcccctagcctcccagcccccgagaggccccagtgtgtgatgttcccctccctgtgtccatgtgttctcattgttcaactcccacttatgagtgacaacatgtggtgtttggttttctgtccccatgttactttgatgagamtgatggtttccggcttcatccatgtccctacaaaggacgtgaactcatccttttttatggctgcatagtattccatggtgtatatgtgccacattttctttatccagtctaacattgattggcatttgggttagttccaagtctttgctattgtgaacagtgctgcagtaaacatacgtgtgcatgtgtcttatagtagaatgattcataatcctggtggtgacaaaatctctcagcatttgcttgtctgtaaaggattttatttctcctttgcttatgaatgttagtttggctggatgtgaaattctgggttgaaaattcctttttttaagaatgttggatactggcgctcacgctcctctggcttgtagggtttctgccaagagatctgctgttagtctgatgggcttccctttgtgggtaacctgacgtttctctctggctgcccttaacatttttttcttcatttcaaccttggtgaatctgacgattatgtatcttggggttgctcttcttgaggagtatctttgtggtgttctctgtatttcttgaatttgaatgttggcctgtcttgctagtttggggaagttctcctggataatatcctgcagtgttttccaacttggttccattctccccgtcactttcaggtacaccaaccaaacgttggtttggtcttttcacatagtcccatatttcttggaggctttgttccttcctttttattcttttttctctaatcttgtcttcacgctttatttcattgagttgatcagcagtctctgatatcttttcttctgcttgatcaattcggctattgatacttgtgtatgctccacgaagttcttgtgctgtgtttttcagctccatcaggtcatttatgttcttctctaaactggttattctagttagcaattcctctaaccttttttcaaggttcttagcttccttgcattgggttagaacatgctcctttagctcggaggaatttgttttacccaccttctgaagcctacttctgtcagttcatctaactcattctccgtccagttttgttcccttgctggcgaggagttgtgatcttttagaggagaagaggctttctggtttttggaattctcagcctttttgtgctggtttttcctcatcttcgtggatttacctacctttgttctttgatgttggtgaccttcagatggggtttctgtgtggacgtccttttcgttgatgttgatgctattcctttctgtttgttcattttccttctaacaggcccctctgctgcaggtctgctggagtttgctggaggtccactccagaccctgtttgcctgggtatcatcagcggaggctgcagaacagcaaagattgctgcctgttccttcctctggaagcttcatcccagaggggcacctgccagatgccagccagagctcttctgtatgaggtgtctgtcaaccactgctaggaggtgtctcccagtcaggaggcatgggggttgggtcagggacccacttgaggaggcggtctgtcccttagcagagctcgagggctgtgctgggagatccactgctctctgcagagccggcaggcaggaacatttaagtctgctgaagctgcacccacagcctccccttcctcctagtgctctgtcccagggagatgggggttttatctataaacccctgactagggctgctgcctttctttcagagatgccctgccccagaaaggaggaatcttgagagacagtgtggctacagcggcgctttgcaagctgtggtgggccctacccagtttgaacttctgkcgattttgtttacactgtgaggggaaaaaccacctactaaagcctcaataatggcgggtgtccctcccstgcccaaggtccagcatcccaggtcgacttcagactgctgtgctggcagtgagaatttcaagccagtggatcttagcttgctgggctccgtgggggtgggatccgctgagctaaaccacttggctcccttgcttcagccccttttccaggggagtgaacggttctgtcttgctggcgttgcaggcaccactggggtatgaaaaaaaatcctgcagctagcttggtgtctgcacaaatggccgtccagttttgtacttgaaacccacggccctggtggcgtaggcacccgagggaatctcctggtctgcaggttgcagagaccgtgggaaaagcgtagtatcagggccagagtgcaccgttcctcatggcacagttcctcacggcttaccttggctaggggagcgagttcctggactccatgtgcttcctgggtaacgcaatgccccaccctccatgggctggatccgctgtgtaaccagtcccagtaagatgagtagggtaccttagttggaaatgcagaaatcacccaccttccgtgttgatcttgctgggacctgcaccccagagctgttctattyggccatcttcaagccaggctctaatttttgtatttttagtraagacggggttttaccatgttggccaggctgttctcgaactcctcacctccggttacattattcttgtatagagttgtcagccaagatagtaaccagagatgttttgtttgttgaaaagtacatcttaagctgggcattccatcaataatagactattttctggagatgttaaaaatcactgttatgatagatctgtcatgataatatttagacrctgtgactcttcagaacaacagtgaagaaagaagatgtgatgtgatgattacagcagtaatgactctgagcatcagatttagtggtatttaagttatgctgttactttgcaagtgatacttaaatatggttaaaatacccttggcagtaaggatgttagattaaatgacttcccacctgttccagtctttctgatttttctttcacaaatgttactttttttttttttttgagtcagggtcttgctctgttggccaggcttgactgctgtggcatgatcatgactccctgcagcctcaatctcctgggcccaagggaacctcctgcttcagcttcctgagtagctaagactataggtgtgtactaccacatctagctaatttttttatttttatkttttattttgtagatgtgaggttttgctgtgttgtccaggctggtcttaagcttcctcctggcctcaagcagttatcctgccttgacatcccaaaatgctgagattacaggtgtgagccaccatatctagcccacaaacattagttttctaattaacttgtaataaccccctaagctttgctgtctctggctatgctgatggttctaatatgggaagcagttaccacccccacaccctcaatgtgtactctttggtattgttctacctatacagtgatgagttgtcaacatgtagtacactttctttaccagatctccctaagatacaacacaacagtgcctagcctggaagccacaaaggacttcaaataacacagagaagtgacccaccagaattacctgggaagcttttaataagttgtggatgttgcttgagaatctgtgcttttgttatgcagtgttcttgcagagattatttccacttgcctgccgtgcatagttttgaaaaaagccaaactagattgtgagctccctgagagcagggacatactcctttccctcaaaattatggcctttgtgtctcgtataccttctgacagatattaggcactgaataaatttttgttaaatgaatgaatgagtctttggtttcaatgacatttgcttctcttgaggaacctggttagttgacataaattgcatgataccacatagaatggggaagctctccctttcctctctcttgctcaggtctgcagaagtccaagggtcttctgcctctcccttcaattaaatttcaaaaccagcagttactactgttgggtgtgggacaaaatgcctactactggtgggctgctaagactaggcatgtacatacaagaataaacacaatatatatttaggcgtttgaatggatacagatgcctaagagagagagtctatcatgaaaaatttgaacaagtagccctcatctactataaaacctacagttttctaacctgaattattattgtttcagttatctgctaaatgtaagctctttgacggcagtatctatgtctattcatacttgtagccatcatagcatctgacacagtgcattgcatattgtaagagcccagtaaatgcttaatgagggtatatatggatcagattgcccagaaggaactctataaataatgattgaatatcttctttaataaaatgagggaactggatcagaaagtctaaaagaagttccctttattgctcaatttttatgatcctgtgatttagaaaaataattttaatgggcagtttcatagtttgaatgacatattattcaggctttttaaatataggtgttagaaatgaagcttaaagcagttggaagcaatagagaataaggcaggaattaagtacttctaattaacaatgctagataatgtcagtgactgtttcttgtatctgtactgtaaggacaaatgctgttcatagttgtaacttctaagacaaggctttgatttctttacagtattcttcacctacaccagaaccacttgtaaagaggcaagaatatttactaagagttgaatcatgatatgttttttttgcaatatattgtttaaggtttcttttaagtcctgcctctttcaggaagcctttacctaatagttcacttctctccaggaaaggactgatctttacatgtatatctttctgttactgtatttaggcccacaaaacccctaactagatattgcctatgggttaagaacagagtaaagatatgaagaactgttttcagacatgtaaaataaggtaatgtgaatcatgtagaagagacaatatctttattccttttactctcaaatcataaaaacgaaagttataggagggaagatttgacttaataatagggagaatgtttctgaaaggtagaactctttggaagggacatgatctactttctactgtgtgcactagtagtgcttaggcatcttgtaaggattgttgtgcagggagtttctctttcagcttgaaggtcagctaaatatatcatctgagaatctgtaattgaatttaacaaatattttagtgcatctttgcagtaggcattaaactctacataattaggtgatggctggtrtctgttacagtctagcacaactggcttaggaggcaagtcttattcttgcagcactattcacagtcacaaaaatatggaattaacctaggtttccatcaatggatgattggataaagaaaatgtggtgtatgtatgtaacatggaatactattcagccataaaaaagaatgaaatcatstctgttgcagcaacatggatagaactggatctcagctcactgcaacctctgcctccagggtgcaaacaattctcctgtcccagcctcccgagtagctgagattacaggcacctgccaccactcctagctaattttttgtatttttagtagagatggggtttcaccatgttggccaggctggtctcgaactcctgacctcatgacccgcccacctcggcctctcaaagtgctgggattacagacgtgagccaccatacctggcctggaggccattgtcttaagtgaaataacagaaacagaaagtcaaacaccacatgttctcaattctaagtgggagctaaataatatgtacacatggccagagggcatggaataagagtcattagagactcaggtgcgagggaggtgagagataagaaattatctaatgggtacagtcttcactattcgggtgatggttatgcaaaacaccatgtttagctttcccaaataatagcacagttattgaatgagggaaatgtggtataatggtagcagatttgtttaccagtgttggccagcaaccaggaaattagttggtcagtgagtcacaacattaatggggctgccaaaatatcctctaatgagctgttttgttgtattgaatgaagtaattaataatttttttaattataaatatttatattccaaatagaagtagaagttggtacttartattgaacagactacaccaaagaagtaggttaagagagaatcttttaagagaaacaattttcttaggtactttamaggagcattaataataaatacggggatagagagtaggaggtaagttggctattttagataacatgggcaggttaagttcttcctgagagacracacttgaatggtagagaaagtggtcaactggagcagaatgccccatctgaaggaagaatctactctgctgcttcccagctgcagcttactgtcaccagtccagtgtygccaggactactatttttcaagagaaaccaagattccatgtttctttatgaaaatttttaaactgagcagrtaaacaagcatatctgaagaatagattatcttttctgtcagtttgtgacctgggtgatgctgtcttctgagtcctcagccctatgttggaacaaagaaaaaggctttgaagaaaccagagagctgctttaaatacttgtgggttatcaggtggaagacagatttgacttgttctatttccagaaggcagaacagagacaggcagattttcactcaaggaaacacttaacaattagagcagactagaaatagaataggatgtttgcttggaaattcttctgttcctggaaagtggtgttcaagctaatagtggatgatgagttgtcaaaagtgtctagggaagggtctaggtaagatgacatttcaagttcctttttatcttgaaattcttgaatcaccaagatctagatccctgttcagctcttctccatatcttcaccttcatgttcacagctgagttatcaccttcccatactaggaaagtcagtatgtaaagtcagtttcttaaaggcttggtttttcygtgtgtctgcttacataatgaaggttcattggtttacagttcttgtttaagatgtcctttgcatgttaggttcattggtttgcagttcttgattaaaatgtcctttgcatgttaagcagtcacaaaacttgaaattaaagcttttagagtctctgaagctataattgttttattctcccaactgcgcataaaacggtttgatagctagtgctttaactaaagctagttgtgttcgagttctaactttgcagctgtcttggagatctaatacattagcaaagtgaagtgaagtaaagatatatttttcaaaagtccttgagtgggattatcttacactttattatttatcttgatactaaagataagaaatagatctctgctatttcatttttctttactcagtatacataactttttgtcaagagttaatatagaagtatgtctgtttctctcataacccttgttttaatggttaacaattgtttatttcttatcaggatgagagttaatatattgccatccttgataagaactcttggtctaattttacttataactgctttaattactttataacacactaatgccataatctatataatgcttgcatgtccagtgcrtgtatttatttctagatcagtgattgtaataggtactaggtgcttaaaaatacctatactggaatataagcaattacattttttcaaaatgtatggagtctttattatgatactcatgaatgtttttaatgagaatatgataataaaccctacatctcttcctaaatctccgatcagtagtagtgtgacctggtgctacctatcagaagaatgagggccctcccttagcagtggagtactgaaaactgtatctctgcctctcctccttcacaccctccttcaattcatgatcctcagggagacttattttgcctagtttagttactgagtctggtggttgacctcttgagtaatgaaaggacattactgagaattttgagagtgctgagagtgagtggatacttttaaggttttctcttcaagcttttgttccctaatttggaaaggtaagtaatgtttgataatcttactaaattccacagttatttattctctcaaacccttcagaaaatacccaattgaataagatataaatgtttaaggaacttttttttctatgttgaaccagataaatctaagaaataaaagaaaagctacataatctgcagtataatattaatgaaaatacagcagagacttgcagttaccatgttaaggtacagatgatttcctaaatgaattcatttgtctatgatcagtaactaaagaagcagctagctggggtatctactcttgtaggggagcaggtagcctttctgggaggagagcacatattaactgacttaaacacctttgtttttttttttttctgtatttgctttaagtgatactgaatttgatggctttttctttggcttgctaaggataaaatgtagaaaatttaattctgcttggattaatgaacatatttttagaatcttgtacaaattgtagcactaatgaaaggtcctctgctccaggcataakgtttcatttaagaatgaaaaagcaaattgagctaatgtattgtgtaagaggtttgtagttaaatacataaaatgatgtcagtttgatttcagctggagctaaggtactctgatagctatgagatgttaaaataatagaaacatttaaagaagtatgatagctgaattttatataaataaagtagtttgattttttataactggtagcgtttattttacttcagtgatttggcagaggtactaagccaaataatttttaaattggttttatcttaaattggttatatctggtggtaacatttatggataattagagtcaaaataagcaattgtttcatccttttctactttaccatgttttaaacatttgagtttggaaaacttaaattatatacaaagtagaaaattagtataataaagactttaaatcacatttatcaatgcacagggaatcgtgttttaactatacccccaccaaacatatcttgcctcagattttaaagcaaattccaagtgtcaatcctttccttataaatatttcagtatgtatccttgagtaagtccataaggactaatttcttttagcataactataatgccattaaaacagctactttttagttgcagataagaagtagggtaggaattgctggggtctaacccagttctgatgacattaaatagatcctagatagttggacaaatcatttaactttcttctcttcctgctctcttgtcttttaaagggggaagctcaactaaattttctttaaaatcccatctgtctctgaaatttgttaatttaaaaaattagacttctagtttccagactagcatgtaaggagcttagaagtcattacgtcaaaaaataaacaggttaaaaagctgaacaaactgaaaaattaacagttcttcttagatctgttatagaagcaaggttacagggtaaaccactcccaccacccccagattgaagagacaggcaaatacagagaacaggagcagaagcctctgcaggaatcagcatcacagtaggaaaacctgaactgcaattgataaattgctggggctcaggatatacaagcttgagagtgaaaaactttaggggtgacgagtcatgagacctaatcataggactatagaatgctctaccctcccccgctttcttacccccactttcttagccctattttctgcagttccttttacccaattcaccatgtccagctctcaagaaaaaaattacaagtgtactagaaggcaaataatacacttcgaagagacagaacaagcaacagaaccagattcagatatggcagggctcttgaaattatcatatcaggaatttaaaacaactatcattaaaatactaagggctctagggataaagtagatgccatggaagagcagatgggcaatgtaagcagagaggtggaattctaagaaagaatcaaaaagaaatgccaaaggtgaaaaacagtgaaataaaaatgaagaatgttttaaatgagttcattggtagacttgacacagctgaggaaagaatctaaaaccttgagtatatgtcagtagaaacttccaagatagaaaagtaaagggaaaaaagactgaaataaactgaacagaatatccaagaactgtggaacaacaataggtgtatyatatgcatgatragaataccaaacgaagtaaaaaaggaaaggaacagattaaatatttgaagcaggaacarcagaaattttcctgcaaattaatgtcccacactaaaccacagattcaggaagctcagaaagcattaggataaatgcaaaaaaaaaaaaaaaagctacacatagtcatatcatattcaaattacagaaaatcagtgattaaaaatctggaatgaagcctgatggggtgtgcagggagacctgacttagagaattatatccaacatttcctcagaaaccatgcacacaataagagagtgaagtgaaataattagtgttgagagaaaaaaacttccagccaaaaattccataccctgcaaagttattcttcaaaagtgaagaagaggtaagactttctagctaaacaaaaattgagagaatttgttgccagcagatctgctttgcaataaatgttaaaagaagttcttcagagagaaggaaaatgacataggtcaaaaactgggatctccattaaaaaaggaagaacatcacagaagggataagtacaggtaaaattttaaattttttatttttcctatttttaatggacagatcaatctgtacaaaataatagcaacaatatattgtgtgcgtatacacacacacatatatatatacttatctaaaagtagaaagaaataacaacaatggtaccagggatgagatggaagaattagtattattttgttattaagtacttgtgttacctgtgaactggtatatatttgaaatatatttatttgaaagtaggcttcgattagttttaaaggtattttgcaaaccctaggagaatcatttttcaaaaagttaaagaagtatggccaggcagggtggctcatgcctgtaattccagcactttggggaggctgacatgggcagattgcttgagcccaggggttcaagaccagcctgggcaacatgttgaaaccccatctctaccaaaaaaaaaaaaaaaaaaaaattagccaggtgtcattgtatgtgcctgtagttccagctatttgggaggcagaggcaggaaggtgatttgcacctgggaggcataggttgcagtgaggcaagatgatgccactgctctccaacctaaaaaaaagtataactgataatctaagagagaaaatggaattatataaaatgctcaaaaccacaaaaggcagaaaaggagtgaaagtaaaaaataggaacaaagaacaagggcaacaaatagaaaattgtaacaaatcaatagataataattaaactatatttgaatgatcagtttgaatagcagtggcctaaatatacaaattaaatgtcaagagattgtcagcatggatgagaagcaagactcaactttatgttgtctataagaatcctactttaaatattaaaacacatgtagagtaaagataagttactggggaaagatatactatgctaacactaatccaaagaaagtgggagtacctatattaatttcacaaatagaagacttcacagcaaggaaagttgtcagagatgaagaggggcattacataatggtaaacgggtcaatacttcaagaagacgtagcaatccttaaygtgtatgtgcataacaacagcatatcaaaatatgtaggacaaaaacttacagaactataaagagaaatagatgatttggctattaaatagttagagacttcaggaccccctctatcagaaagtgatccagcaggcagaaaattagtgaggacatagttgacctcaacagaatcatcagtcagttgaatataattgaaatccgtttactacattatacaccaccaccacaaagcacattcttcttaagctcacatgaaacattcaccaaggtaaactgcattctggatcataaaacacaccttaactaattttaaaaatgctgtgcgaccacaatggagttaaactagaaattagtaacagaaagatagctgaaaatctcaaaatacttggagatttgacaacattattataaacacatgggtcaaagaagaaataccaagagagattttaaaatattttaaacaatgaaaacaaaaacacagcctatcagaatttgtgggatgcaacgaaaacagtgtttagaaggaaatttaaagcattgaatgcagaggttacagaagaagaaagatctaaaatcagtaatctaagcttctaccttagaaaagaagaaaaagacaagcaaatcaaattcaaagtaagcagaagtaaagaaatttaagaattagtgtatatattaatgaaataggaaacaggaaatcacagaaaatcaatgatctcaaaagctggttctttgaaaacatcaataaaatcaataagcctccaaaaaaagagagagaagacacacgttactaacatcagaaacaaaagagagggccaggtgtggtggctcaccctgtaatcccagcaatatgggaggcagaagcaggaggattgtttgaatccagactgggcaacacagtaacaccccatttctacaaaaaatagcctggtgccaccacatcacagttactcaggaggatcacttgagcctgggaaatggaggctgcagtgagctgtcatcataccattgcagtccagccttggcaacaaagtgagactctgtctcttaaaaaaaaaaaaaaaaaaaaaaaagaattgaaaaagaggctatcactacaaatattttgaacattaaaagggtaataaagaaatactataaacaacttcatgtcctagatgaaatgaaccaatttcttgaaagatacaacctgccaaaattcacacaagaaaaaatacacaaactaagtaggccttacatatatattaaagcggttgaatcagtaactaataactttccaaaacggaaagcaccaggcccagactggttcataagtgaattctgtacattaaagaagaaattataccaattttctctacagtcttttctagaagatagaagcagagagaatccattttaattcattctgtgaggccaccatcctaataccaaaaccagacaaagacattgcaagaaaagaaaactacacaccaaaaaatttcatataataggcgtaaaaaattttaacaaaatactagcaaatggattccaacagtgtgtagaaacaactatacaccatgaccaaatgggatttatcctgggtgtgcaaggctggttcagcattcaaaatttaattaatataattcatcccgtcaacaggctaaagaaaattctcaggatcatatcaataaagaaagggcacttgacaaaattcaacacctaktcatgataaagacttggtaaactaggaatagaagagaacttccttaacaacattctgctcttacagcattgtactagaagtcctagctaatgtagtgagataggaaaaggggcaggggaaagtatactaattggaaaggaagaaattagactttcttcacaaatcatatgaccatttatgtagaaaaccgaaaagaatcgacaagaaacttctggaactaataagcaattatagcaaaattgcagtatacaagattaatatacaaatgtcaattgctttctatataccagcaacaaaaaagcagaatttatttatttgagatggagtctcggcctgttgcccaggctggaatgcagtggcacgatcttggctcactgcagcctctgcctcccaggttcaagcaatcctcccacctcagcctcccatgcagctgggattacaggtacatgccaccgtgcctggccgaaggaacatttttattaatcatggttatagtagtaggagttaattctggaaaggttaggttttgagattcagaccccttgaatgttggactgaagcagtctgtctagtgcttaagaatataaactcgatgcagactatttgagcttggatcttatctctgccaccttctataatagcgcagcttattctataatcgacataaatggtcatatgatttgtgaagaaagtctcatttcttcctttccaattagtataccttatctcccatcttctataatatagcacttaaatataggttacttaacctgtctttgccttgttcctcatgtgtcaggtagtgatagtaacactacctacctcatagggctgttacaagattaagagttcatccattaaagtttttagaacagtacctggcccacattaagcacttaatatgttggctattattcttggtggttgtgtggcgttttttttgttgtttttttgtttttttctttgagacagggtctcactctgtcacccagactgaagtgcagtggcataatcatggcctcaaccccctggggtcaagcagtcttcctgtcttatcctcctgagtagctaggactacaggcatgtgccactgcccctggcttatttacttatttcttttgtagagatgggatatccctatgttgcccaggttggtcttgaactccttgcctcaaggaatcctcctacctcagccttccaaagggctaagattactggtgtgagccactacacctggcctgtttacttcattttttaggcaatagttgacaagtttctgtatacataagaatcaaatacagagtttatgaaatgctggatcttattgccagagcttttgattgagtgggagctttcagttgagtatagatttggccagtgaatcataacaaatatgagggtaattttgctgcagtagcctacagcctttactttgagaaactgcagaatgttctagagattcagtgctgactttacaacaatggagtgggatgggacaagtggtctgttgggagaatttatctatttggtatcttcactgggaactggaagtgggtgaatagaaataaaagggttttgagatgagtgcttgagatacgacaaaggaagttttcacaggctttggtgtgaaaaaccactttgctattttgagcctttgtgactcaaagaagatggtacactgaagaaagaaaaagtcaggaagatgaatctgtttgctaaggatttattttgtttaatgtgattgaggtccactggggtcatgcttagtgagctgttcaaagatgctttcctgaatgtttctgcagcgggaaagccacagaagtagtaggttgtctaaaacaatagttgccaccagccagctttccagtttttcaggaaaatgctatgagtacaatatattaatatggatagatttaaatcattaaaaaaacttctctgatgcctgtgagctgtggtatatgtcagctgttaattttcttatccttttcttagataacattttatttaatagagctgtcttataagttgtaaagtgaggtttatagatttaccatcacttctgacatcttcagatctcctctttaaaagtacaaaatagaactttgcagtaaaaataaaatagtataaacagatttttttttagcctctgaaaaccactatatattagtttgcattaaccactatacgtagaaatatcttcctgttcaaatgtagttatgtgatactttgtgaaaatagggccttaatatttaggggttaaaattaattcaaaayattttcagtaagaatgggccaactyggcccacatactgtagtacaagctgataagtagtcattagaagatgatgatctaagactactaaataagctctcacagacargtcatatgaaaccacgtttatatctaatgatttaagtgtaaagcatgtaggcaaacgctactagtcatcacactgtaatgtacagctttcagtacagaaaatttggataaatgttctgcagctatatccagaaatcagtttttcattaatttctctttctatgttttgtcagatacagtaattatatcacaagcagtcaaattctaaaatggtatgtgtagagaaaagaagcaacagagttcttgccattcctaattctgattaccctaatttgggataaatatttccttcttaattaattggttaatgcattaagattgtgagctgaaaggtatcataagtgcaattattatttgtatgaggattcttcgttcataattggcaaaaagtgaaacaaaaggaataaccaaaaatcataacaaatagcatcagcatttaaaagcaaatttctagaaatgattactataggactttaaacaaattttttacatcagtgatatgatttttaatatttttaatattcagaaggctttttatgtaagtgcatatatcaacattatcagttataccttcttactgataaattcctgctgtcagtctctccacagctctaccatgttctttttctccttactttctcgtctcaagttcattagttgagaaggatgcttactattactctgtccaaatttggtagtggttttctcaattttgggcatttcatgttcaattaaaatttatttaattgaacttttgaaagaactttcccagccatatagagatgtatttacattatagattcatttccagataacagtcacacagagacttcttttctgttacttttttcttgcctttgataatgacattaataatttaataataaactattaacatattaacagatataatagatgttaatattaatataatttatgtgtggttctataagaatagacacttcgatatcatgatagaaagaktcttgattatgatgcaacttgaatatattaaacactaaactttcagcttatgatgccattaacagaacttttaacttatgatgcctttaatactttattcctgtgataagatgtgaatggaaggaaaaaataaatattactttttggtggaaaagtgtacccagttgtttattcrtacagaaaataattattgaatgtcagtttctgtatgccaggcactgtttcaggcacctaggatactgtggtggaccaaaatcttatactcatatcttttctcccaagtgaattttgctatatcattattgtgctcctctataaagaattagaataacttcataataataaaaaattataagttgactccattaaaaaaaagctgaaaaacagctgattaaatcctattgtatgtaaaactgaattttgttttatgygtgcttctagataaatagtgatagagttcttgagtgttttaatgaagtgttttaatgcaggtgaatgctttggactgatgtcaacagtgaatgttaatgatttttgagcatggttggcactatgaattggttgtttttaattttttgaaactaagtacattgacgcagatttatatgatctgatgatatcttattggctatgattaaccagaatatgtgatatttaaacgttgaaaatgcattaaaggatcaagaaaacagcttgtctttatgactttttttttttaagttttaaaaacactgagccaaattttggatttaacattcccaagctatggcctaagagaaagacaaatttaacagaatgagagtaaatgaagggctggcccatcagtgatctctttttataaatttacaacttccaagaaaagctaactaatagaagtatatcatgtcttgctttttcacaagatgtaaaatacgggaatacatgtagactaagaatggtaaatttttaarttacctcgtttgtaagggaaaaaagattccccttttttctcatttacatttaaaataaatcctcaatattatatggaactatttataatatagtgaaacccattttatttgaacatacaaatataaaaatttctggtagtctgcagctaatatgcactgtctgaagctaataggttgtgcagaatactgctgctatttgagtaaaagttaatgcttttgagaccagctaatacacttaactacactgtatgagctgtgggtgttccgcttatttttattacaggctttattactgtgcaattttgttgtacrttaacaatcatccactttaaactagtgcttaaatacttattgaatgtggtagccaaagagcaaaaaaaagatctcaatgtaacatccaattgcttactaacataacctggattgtgatttatctctaattttatgacagtaatatttcagtatcaaactagaattctgaagagaataaagtttgcatcccccaaatgacacaattgtgcattagctctacttaactagacaaaatttaaaggcaaaaaattcttggtacgaaacagatactcccaaaatgatcaccctatgtgtgtccaaaggagttctcactatattgtgtaagtcttcttccctccattatttaaatagttataaattttcattttattatgtgtatattagactatatattttataattttcctctctgtaaatgtacaaatatgcaaacttgtataaattaggtaattgcataaaaattgaaaggcataaagatgtactactgagttcaggaaacagttggattgggggtgtgtttaataagtagcacaattaagatgtgagaaggaaaaactgaagaaaaggaaattctctcagwgtaatgctttattagctccaattttccccttgtctcttatctgaagcaagtgatttttttccatttgcttaaaaataaagcatttgcgcacagaatgttagctcattaaaaagacctttattgccataaatcgctgcatcatttgcatatccagattcacagaatcaaattacagttcaaccaagtatttagtatctggaaagcagtcttggtttcatgtctacttattttcccaaaactcttgttaattctccttatagttgttttcttagtggctgaaattaagtgatgtctagtaaataagccagattgcttcttaaataaaatctggcctgttatttatgtccccacctattgtttcaaactctataatttgaacttacacacttgaaatcaatagtaatagttatggtgatagggacaggtgatgggataaggattttattagtagaatcagtcatgagtctaaaactgcactgctagatacaacacacaataataactgctagagataatacttaaccgtaacctgcagagtaaatattcttaatcctagtttacagaataaaaagcttggagataaaagttaagttacttggtgtgaggtctgattcacacagccagtaagtggtggttttggtcacttcctcctcacccctttgacaagggaaggattcctgccatagggttatgaggatggctgaacacgtcagttgggctcagcagcagttagttacctatgttcacagctaaggcaaagaggaccctgtgcctcaagtggggtcacgtggagttgcacttgggaacagagtaaacaactaggagctatgggaggcaggctttgtagtatcaagagggtgggggtatcccctggttcccatggaaggatgtgattggcttgtttgaataattcctcaagctgacaagaaactgaaacctactattcaaggataaggaagaactgcatctggcccctttggtaaggtggatggtttcgctaggggcctttattcatgagagcagagtggagaggggaacgtatgggttacgtcggtggtccccaacctttttggcaccaaggtctggttttgtggaagacagttattccacggcaggggcggggcaggctggtttggggatgaaactcttctgcctcagatcatcaagcgttagttagattctcataaggagcgcacagtctagatacctcgcacgcacagttcacaataggatccccactgctatgaggatctaatgccactgctgatctgacagaggtggaactcaggcaacaatgcttgctccccagccgctcacctcctgctgtgcggcccagttcctaacaggctacagactgttagcagtctgtggcccagggtttggggatccctgggttagatcattcaaggccttcccgattttaccaggtgtcaaagcggcacatgatattgaaccttaattttaggtgttataccacagtggctaaactagagttctgattgtgaactttcatgactccagtgcccaggttcattctsctgttccatgatatttttcttcttgccagaatgacatgttaacatttcgttagtaattgagtactttgctttcactgggcatttcttagtcctgcgttcttcagaattcgtacactgtagcatctgttgtattctcatagaaaactggagcgctctcatttagaagacatttgaagatttgttttcctttaaaggaaaatctgagtataagttctaattatatcttgatttacagaagattttttttttttcctattctcaaagctgcagtgagctgcgattgagccgctacactccaaccttggtgacagggcaagatgctgtcccaaaaaacaaaaacaaaaactatactccctccccaaaacaaaatcttatttttccatgttccatcttatttttattagaacgtcttaagttccccctctgcagccatgaaactggcataccacaggtctggaatgcctctctgtctctccatttgtatctccgacattagaccatttcagccactcctgcatgcagttacacccacctcatttttatcacagttagggaatgtttcacagagtattttgcataatactatgagctgggtgctacaagacatttaaaaaataatagctggtttctgccattgacactctcactgtggagaacaagacataagagttgtgtagtgtaaaggtaaatcagtacacatagaacccagactcctaacccaggcccacaggccatacgtgagctggcccctgcctgcttctggaggctcatctcttgttctttctccctttcacttgactctggccacgttggccttccttccacttcccacacacgccaggtttttctcatcccagggcctttctccttgtagtttacttggcctgaaaaactcatccttacatgtctgactctcttttttcaggtctcattgcaactactatttatagggatagttcttccttgaccatgccacctaaaactggcccttttgacttttccatgcatagtaggtcccatgccacccacttaatacctgtgtaatttttccaagatgtttaatttctctgtgccacagtttgctaatctgtaaatccaggagtattttaatagattaggtttttgtgacagttaaatgcattaatatcatgtaaagtgctaattataagaatctctggcatatagtgattgctcagcaaatgcaatcagtttctgaccttcatcttcmtcattaagggtaaaagaagtagtgtaaaacgtaagtactataggagctcagaaaggagaggaatgccggaggccctgaatcaccatgaacactttccttgtgacagtagaatcgaacctcactgcttctgtatagtgtctggcatgtttccgtcagacaggcactccctcctcctttggatttctacgtccttttggttctttgtgtgatacttgtatcgtagattgtgtatatgttctcacagaaaaggtcatcctgcatctctgcatcctcagcattgtgtgccgcacacaggacaggtggccacttatttgattaacatgagaaaaacacagagattccatgaaatcagcaagttttaaacaccctcagtgtgggcagtaaatgcagtatgagcacagtgactacaaagatcagttactggaaatgaccamgttggaacagtgaggggcagactattgtatggtcttaaattggctttagagtcagattaattcagcagatttgaagagcatcatttcatgccagtgtctaagctcagattgtaggatcacaaacatgaaccagtacaggtttctgtaaagcattttaacttgattcaggtgggacttcagtgagtaaagcaagaaaggtgttccagacaagcttcagaaagagcaaaagtaaaggtgcagagttgagaaggttcaggaattcaggttctctagagaaaagatttcctcatgctggagcaagaggaaataaggctgaagtgagggggtccaaattatggaggatttagggtaccagaaccagaacatcagctttattccataggagcctgtggaaggtttgagcaaaggattggcagaaatagtactcaaaattagatgatacatttctgtattttctgtagtgatagaagttccttgaacttaaatttgaaaaggtttgaattaaaagggacagatgttctcaagttatatactagacattttcagtagttgtacggtttttgagcttttattagttggtcctaagtaagttttatagcattatgataggcagttggtgacagcttagtcatgtgttctttcttgagtaataattaaagtattaayatttttccttttcattatattttatgcatcatggtttgatatatgcttgaaatatttactaaattagatattgctgcatgtggtccatcccacatataaatggaaaagagaaacttaacatagttcataaattaaaatatttggtttcagctgtattcatattgaaaccataaaagaatcagaattactgtgggtttatgattgtcaggttaccaccatcactacaaattttctgataacaacatattagtattctgataaggtttgtggcttctttgcaaggatatttgaatactactcaacacactacataatggttaactattgttgtctttattttaaggaaggcatgaatattgttagatttgcccctaagtaattgagtgatcatttttatatacaagaaaatcagagtagaatgcaaaatttggaacaggaactcaataatacttataaataagttgattcaaagaaatgtttcaatttcttgacattgaattcatgatgttttgcttttaacatgtgatttttaaaaaatactgttatgtgtacaggggaaggctaacctgagactttcccttcatgcgtattcttcctgtgcactgcaaaaggaaactgtgtgactgctttccttcctgactggccatcacatagggttactggcagatgccaggaatccaaggactaaaggaataaagggtgtgtgttatagtacctgcgctaagagatactgtcaaactcagaggcacccctcctcctccatgtcttaaccctagaattgttttagaacttcttatggataagtgtttggattaagggagatctgggaaatgggatttgaattttaagcaagtgagccctggggatggctagctgcccaaagtctctaggaccccaaagagattatgagagagaacgttgagaggtctggaatgaattatacatactcttataatgaactttctccarcttgtccttgagcagctgtctccatcccatccctcaagtgctttggaacccacatcttataacaatggaaagatagataaccttttattttaatgtgtttatttttattttaatgtatttaagtagtttaaacactttcagcgaaaacgcattgtatttctcactccattcctcaatccagatgtataactaaagtaccatagtgctgtccattattagcccattttgtgttttaacctatacagtttgaggaacaagaaacctacctgacatcaagattatactatcagtgaagccagagaagctatacttattcattgtagacattcttatctttttaaattttttatattaaaaaaaaaaaagaggctgggcattgtgtatcacgcctgtartcccagtgctttgggaggccgaggtgggtggatcacgaacgaggtcaggagttcaagascagcctggccaagatggtgaaaccccatctctactaaaaatacaaaaattagccaggtgcagtggcaggtgcctgtaatcccagctactcggagggctgacgcaggagaatcgcttgaactcaggggtcggaggttgcagtgagccaagatcacgccactgcactctagcctgagtgacagagtgagactctgtctcaaaagaaaaaaaggaaaaataatggggtctcactatgttgcccaggctggtctcaaactcctggactcaagcaatccttgcatctcgtcctcccaaagtgctgagattacaggcatgggccattgtacccggctmtcttatcttctttatatagatatctaataagatgtaaaatactgacctgcattatctccatgttaacatttacacttcaaaatctgtaaacggacccacgttcatacgcgtgaacagaaatctttcagcaacaaaagagaaaattgtatttctcgatagaaaggaagtggtcagatcatgccagccaaacaaatctgtcaggctttgaaayatagaaccgttaggtaagatactgagawaaaggataaagtaagatcagcctaaatgtttcagtctagttaagttgatttgtatattacttagaaatttcattttcagggaaatagttttcagatttaaataactgtaaagagctgagttattctttgacttggatttaaaaaaaaagaaaaaaagtgtccygaagtcatttcctgccagtttgtccccccaactttttttcctgctcttcctgtaactggttcttgttacggcaatgtagctgtatatttaaatcctaagagactcgcttattgtgagtaggcagggtcagtagtctgctgaaacaagcacaggaaacttgaaacacctaggggctattttaaaaatcccttgccactgacattttagttagaattctaaagagagaatgggctgtttggatactgagctccagtacaaaagagctggggtttttacaccgacttgcaaaccactaaaatcatttgacctggtgttgtgtcacttgggtattctgaagcatcagatgaaaactaatatccaccctgcaaggttggcaggcaacaattgtacctgtgaagtgagcatctatcaaagaattggggaaggaaggccgggcgcagtggctcacgcctgtaatcccagccagtactttgggaggccaaggcgggcagatcacgacgtcatgagatcgagaccgtcctggctaacacagtgaaaccacgtctctactaaaaatccaaaaaaaaaaaaaaaaaaaaattagctgggcatggtggcgggcgcctgtagtcccagctactcgggaggctgaggccagggaatggcgtgaacccgggaggcagagcttgcagtgagccgagatcgcgccactgcactccagcctgggcgacaaagcgagactccgtctcaaaaaaaaaaaaaaaagaattgggtaaggaaacttaatgtgtggaggagatgccaccatctctgaagcacagactttgttagaggagctcactgacttgttcctaatagtcatgtggttggggcaggcctctagcactgctgacaggtagcattgattctgtctcatctttaagttatagcgtattcagtattgctttatgctattatttttgaaaggaagttgttaactgtacaacactttaggtgatattatgagctaactattttaaatatatcattttttttaattaccaaaagcagtgtcagaaaatgaaactcttcatttgggtcgtttaaaacacatttgcttttggtgtaccacttatattcaaagacgtttcatatttatttaagtactttaagaatgttattacaaagccttgctttgtgatttaaattgaagttccctagtgttcatattgttagttagaaatttagattttagttctgtgacttttatattgttgattgtaactttggacttatgtggcctgtgtaatacatgctacaaaaataaaatctgggagtaaaagaacatatgtatattttaataaagacctcattaaacattagtaacaataggataaggaatattaactgaaacagacaggaaatcagggtgaaratcaggcagaactgatccttttatttacaccaaactaaatgcactaaagagaagttttaatgaacttaaggagaataccaaaacatttctaaatttaaaaaaaaaaatgaatcctgctactgatgggtatatagcattaatctcccacccaaccccccaaaaaggacttgtctggcttcttgtaagagagggtgatatttcataccttaatcttgtgattaattccaagtattaagatctgtcttctgatcctaagtgttcgtaaagacatataaagcatttttatgaactcttatgccctcctatgtgtaaggaagaaagtcttactatgaagtatagttttaagtatactaaattaaaatgccttacataaggcactgagctttctgtgttgttttctataagatcttataaaagcctgttttatgagcttttattttttgatgtcagagcgttttttaaaatccaaaagaaattttcaaaaggtagaattttgtaagtgaataacttagccagccagatcatcctttcctcagtctgtatccactaccagtttgccttccagagatgcatagataagggggcgtggttactgattcttctgctttcctgtagctctgcctggggtttcccctcagaggaatgtggtttgaaaaacttcctccatcactactttgtttgcagtatgtattatttaattttctttgataatatatcaaatatctatattaataattgaaccaaatttagtaatttaaaattaacagcttgtatattagatgtatattacctgtgtcccctactaaactccctcacaataacaacagtactttccagttttctactcacctctctggccacacagcattcttcttttctggccattatccctctcgtggccattaatggaccaagtgttaggtcttcttctcttttctcttcctactctgtctttccctctgagtgatctcatctctgcctgtggtttcacttaccacctctgaactccagaggaatgacctcaaatatcataaaggcaccacagactattagatctgtcttagctcagcttccccactaagaagagccggaagcagagcagcatgtgctgtttattagggaacataatcccragaagtagagtgagaaacaaggagaatatggtttggtaggggtggagagtcaatacatggataagctattgtggtacctgccaccactcagtcctgtaggttcgttcctgaaaactctcataaactgtgctttaagactgtaccttgtgagagaagaaaggaggaagaattttttcattagtttctgtctcccattggccaaagattcatctttcagtatattaattcctccatgggggtatgcaagtggggaatccaaagcagcgtcaacgcagatgccatagagtacaaggcaagaactgccccccgaggcatgaggcagggaactgtcagatgtacctatgtgaaattggtgctggttagacagctggactaagatacaagtaaggttgagaagatctgaatgatgcataaaagatgcccagtataatacacccctttaaccactgagatccattcaggctctacattatacgtagcttccatactacgatatgaggcctccatttttgtgagaataagatgccttcacttcatccctgagatcagaggttatgtgcaatcagtaactgaatccccttcaaggtggagccctgccacactgtccgaaagactttagacgggacagttagagaaacaaattacagtcccttctgctgcagctgaccgtgaggcagtaattgatacacatcttctatcactcattttaggttttcttcaccagttttgtttttttttttttttttgccagcttgtgttgcttgcctgctgaaataaaatatgacttatgtccctcaaatgtctgagcccttagttgccttgctgttgttgatccatggttgttgaaatatcccatttattgtaaccgctggctatggaagcaccacgagataccccagtgaatctctcaagttctggacatatttcttcttcccccattgtgtagctgcagtctttgcttcttgtggtggtccagattgaatattcctagcagtaacctgactcccttttttctactgatgtactggcttgaggaattcaaagtatcccagcagtatagtcagatcttcaagtttattggaactcttacatgtccactggtggaaacaatcaccccttaaccccatctggaagtcagaacctctaccttagtagagatgaaagtaggatgggtagaaaacacaagtttcacaaagtcaaccctactgtcatccttcagttcccagacctaagtattgaagctgtttataacacagcaccctgtaatggccattgcttcaatgcatatgcatataccataccctggagggcagtgctccaacactgcaggaagtcatcttcaagatgtctcttcagctgatattttttaataggctattctgcctacctattgggccagctgttatttgtgaatggagtgtacggtaaagcaaatggattctaaggggatgtgcccattgtcatacttctttagttataagatgggtactttgggcctaagacagtgtttggtgggatgccatgttgatagatcagttattttataagccctggaatggtggtggtagcagaggtattgggagctggaactaaatccatgttcagattaggtattaattctgtaaagacaaatcattgccaccctgccaccaactcttttactccctctacctccccactcccatgtaatcttatgccaagtgatcggtttccttgagtaatgatgtcatattgagtggttgtcatcagtctctttcattggcagtttacgcatttagcaatagcttttcaacattggtgagaggaagcaccttggccactctattatgggctcactatgtcaactctgtggtggcccaagtggaaggctggctgacagccatagaataaagtatcctattcacctcattgttgatattagacaacacacatgttgacatgctccattttggtagatacctcctggtagttattgtgagacacacaaatgcccctgatttgtgcccaattcatttttccagacctccttatcacatcatctttcactgttgttttctaggcccctgatcaaacagccagacaccatttaccactgccaatgaatcagagtatatctgtagctcaggtcatttctccctccatttgaaatggatgaccaccacatatactgctccggttgttctcatctgccaaacttcttttaccacagttctttaggtctgctcctgaataaggctgcagtgcaacagcagttcatatttggctagatcggmaatcctttttkccttgacagttggtcatgaaggagaaaggcgttagtgatgtgggagtctgagttacctgtgaatgtaattttttcatgcctcctgaatgtgcctgtgcctaatcccaaatataccatttccatcatacaacgggttgtttctctgcccgtcttgctactcagtgggtactttaagtcacagacttatttgttggcacatagtgaggcatgcaaattctcttagggccctgtaacatactaggatttgtttttctagcagaaagttcttctctgccactgaaccccaaggatcagcattgtgacttctcttttggtgcttgccagagactccacagcatttttatccgtcaatgataggtcttcagcctgggggaacagagagagaccccatttcttaaacagagaaaaaaaataggtcttgtaccatgagatccattggtcacagatgcaccatagctgggacctgctacagagtcttctttatcacactcggtcactcttgaaactggcatccttcggggtctctgataaatggatcaaaacggtgttaaaagtactgcatataaatatacagcctccaggatcaaagaaggtccacctttttcttaacagtagatttgagagatgcaaaaacttgtttaccttaaagaggatgttctcagcatggcctggagccctgaactccttaaaaagtttggcagtgtgtgcccataacccttaatttttgtgaaatgtctgctatgtgtattttacttaagctggctagggtactttccattttgtgctaaccagatgcagttagtatgctatcatgaatataatggaatgtgaagatatcccggctgactgaattttgagtgagatcgtaagagttaacattgccctggggaaggatattatggtctctttgccattgtgaaagttacctgcctttcatcttccctactgatagggactgagaagaaagcattcaccatatcagtagctgagtaccaaattgataccatatctggcatgccagttactactggggattctaccagtttaaggttacagttattcattatccgtctgtttggtttttttttttttttttttttatccgtagggtcataaaaggtatagaaagagaatatggtgaggaccaccacccctgcatctttaagtctttgatagtgctcttctctgtagttcccgagacttgggtcaaaactttattaattaattggcctccataaaccctcactctgaccagaagagcgtgctggcatttcaggtcccccagtattggtgtagtttagaactcaattgtaataggcctcaaaaagtttgggatttccctttccccagtgcagttatccatgcaaaacagtccttacatgctgttycctctgcctgacacatttcattctccctgctttccttaggtattatctgatttccctgactaggtcagatcagccatatgttactrmatgatgtgcatctttttttcagtacttacaacagtagtagttttatattaattttctgtgtttatttaattaatgccagtctctatgtaagttccctgagagtagtgtcattacctgtttgtgcactgccctgtcccttggtgcctgtgtcacatattaggtgattaataactatttgaggaatgaatagttagatgggtgaaaggaagtgaaagaaaagcattttgtcccaacatcaggagccctgttattgtatctcatcagttctaagaagcctatttttacatattttaacctttctgatatcaattactttgggacaagtagttattgtgagttagttgtagttatgcattctttaaaaatcttgcaaaaagaatgtcagcagtttggaagaaaattccaggggcagttgtggagagaaatttcaagatacactacctcaacaatgytcttgatggcacaaaggactacattttgtggaaaaacaattatctctgagctgaaaaatgattcagaagaattaaactccaagtgtgaagaagttttagtaattctttttttgttcatgtaatcctttctttgtgctcaagtgtgatatatagcaaacatgactgttacacttatcaagagacccctttcaagaagagtaatataatttttgtgtgataagaaatcactatattacagcctaatttagtgagcttttctcagtggtttgtaaagtgatggtgcaccttattttatagtcaatgaaatatggtattacatggttgtcttcagagcctttattaacattcatggcattttgtgtgaattagaaaaatgtattcctttctgcaggccaaaacagccttgcagctgcatgtgaggaagaaaggttattaggaaactttgacagtatagcaaagtaaatatmaaatcartgttcagaggagtaagtttctgtttttaaaaattatctctttaattaaaggcagtatttttttttctaatggataagccagttgtgaagaagtttttatctgtggatatcagggtcttttagggtagacaggaagtctaacagagtttaattttgactgagtctgtcgaggttagtgaccccgtaatcttttcagaatgaagctcttgccacgaagccttccagttccacccctaggaacttaggtcaactcctgaaaggcatttctgtttttgatgtttgatgtaaatctttattcttacatctttggcaatgtttttgtttgaccatatactctggaactacttttcacactgatagtgtcaaaaatttaattttcacaactagcagcaggtaagcctaacttacccatgttatggagatttggaatactattaggaatagtctactaagttagtattttttaatacatgacctaatatgaggattctgattggaagctaattgggaatgatattagttcctgtcgtgaaagtatttcaacttttacagtaacattaaatacttgggatctagatattttctatttaaaataaatttctctcaccaattggagggtgataatttrtaattcaaatgtgttacctaattttgtataaaataccttttcctggttatgtttcctttctttatcctcayctttcttgtaatgtagacagaaaagtgcagtttgtagtaagctgacctctgaattgctctttgggagcgtagttacaagggattaaaggggccctctgcaactccagagattaggagattaagtcaggcagatccaggatctctggtacctggtgggaaaaataatgtcacaaattttagtgcacagttccatctgtttacttcttctgtctcctttcttggagttcaccacaaacttatattttctggtttttcaatggcttttagaaatgtaatatccatcatccatagagttctattgaattgccctcttacctaacagcccaaaggtatactatggcatgccattgtaagtatactagcagaaagagtttaaactggaaaaatttagggtaactcttatggcattacagaacgtcagtaggaatacacctatcactttccattgaactgtgtgtgctgcagcccaaacaatgaaaatgctcattttgtagaagtgaaaacatttggtaagtgtaagggggatttttattgttagccacatttttagatatcaacagactgcttacatggatttcttaaaaattttttggagaataaaacaacagatctttgtttccattgaccattrcatcatcattattttagtaccaaatctcagaatgttcacaagaagtaactggatggaatttaaatatttgcttcttattttcaactctgattttaaaaattcggatggggtaagaatgagaagctgtggaacttggtgaggtttttgttatatctgattacatttgctcttttcaccactgtctgttactgataattaaaagacaattatccttattttttatcctgattggaaaaaccattatctggttcaatctaatcttttcagcatttaataagattgaaaattcttatgacagttctggtaatactgcaggtgattttttcctaggggactcaggggcagacagaatcaatcacacatcatgattcatcagttctaaaaacttatctcatataattctgttttgaattaactaaataatccagtaagcagtgtttttaatatctcaacggggaaaagttttaaagctggctaacaatgaaatttcccatttttcactggcagaaaccccagccctataatggggaaggtcccaccagtgcggaggccccacatggggacccctccccctagtgaggaaatgtacccctgaagaggcaycctcctggccactgggcccactgctaccctgccacgtgagtacagcaatggctttgaggacctcagcaattttttcatttattggtggccatttgtctgttatgggaattggccaggccgtcttccttttcatcccttaaacatttcagaaaatgagataaaagcctgcttttatccccttgcttcttttttgcaagtttaataaaaagaatttgtttggataaagaggttaggactattgggtagaactcagttaagtgtgattagtgaaacaatctgttcatatctagagcagtacttttcagtacaactttctgcactgatggaaatgttctctctctgtgcttccaacattgtaacactaacctcatgtggctactgagtccttgacgtgtggttctagtacaactgaagaatttaattttaattaattttaattaattttgctacatgtggctagtggctactaaatggggcagttcatgtctatatttaatgctgtgtgcctcttttaacattgctatagatacacctctttacctctttcattatcatctcagaaaaatttgccttgtattatattactagaaatatgattctttaaaagtgaggaaataaattaagaattctgatatcaaaatgtattcaccaacattgcccttatgtagttttagttaccttatgatattaagaaaatttatttaattttaaaattatgaagtatctatttaaatattccggctttattttctactttacgttttaatttgcaacttaatatgtatatagaagtaattacacacattaaaataactttttcattttatttctttttaatgagaatataaaayaccttacattagtatagtatgtgcagtgctattactaaaacaataaatttagcacttactaattataayatggtatttacaagtttcaaagttttattccagtaggtgggttactgaaattacagattaattaaatttgtagttttactggctgagaataaatgactttccactattgagctatcactaaaagttgctgacatcataaaatgttaataagagaaacttcttggaagatttgggaactttttgtactatctttgcaatttttctgtaaatctgcaactattgtaaaactttttaaatgtttattaactgggcacggtggtgcacacttgtattggaggctgaggtgggaggatccgttgagcccaggagtttgagtttagcctgagcaacatagcctctcctcttaaaagcaaataaataattttttttgaaaaattgctcatgtcaaatttgtcctgctatccatttagattcattaatttagctgtatatgcatctaaaataagaattcttagatcagtaatagaggtagtacttacctaagtctcattacatggcatcctcgaaacatcctgagcaatacttataattttacagatgaggaggctgaggcatggaataaagagtaatttgagcagggttgctgagctgatcggtgtggcaggtctgcaattgatagccaggaaatttaggtcttcagtgagcgcttctgacgactataccgtgttatctcttaaggagtcttgattatgtaatgtaagattttgtctctctgctatcagtgtagtaagatgtactttttgctataagaaatccaaaataagctaatatcctggtaataaagtacttttacaacatgaaaagtatagaggtatgctttatttctatttcagtaattcaaacttgattctcatacaatcgttagttatttttatgagcgaggaatatgttcatagtctctcaacaagaaatctctatgttggtggagttttaaaaaatatatttatgcttccctaagatagtggccaagtttgaaaaaaatagagcagtacctaaagggtaagagggatggatgttgttgcttatctcataaagataaatttttatcatttttattgaattattacagggttgttttaccatcaacctgttaatgttattcttactggaaattaaattatagagatttaattgttaaaatctaaatatggaaaaggttggtggtgagttttcaacaattctttgagatgtttttctgggctttggagagtatttctttggctgaaagtggggaagaaaaaggatggagttacttgcatagttcaaaaattgttgcagctggaatatgttagttcatatcctcatttaatgaatgttctatatccactggtgaattcacactttcaacagcacgatatatctagctactgtgtggatttaaggtcctacatttacttgtcagcaagagacacagtaggaagttctttaagaaaatgtgaatcataaacaggtgcaatttttatacagaatcttttttttttctgttagtgagtagacttttgaaccagctgacagtcctccattgactcttccaaagtatttgaatttggaacatggtgttttcttgataagaatgtatgttttgaatctatattaaaatttttgagagactttagaaagtttagtgtaaaagtcgtgtttataaaatatgggaattctagtgcacactgascagttaaaatttatattcagattgttgatttagaataacactgtaacttgatcctagttataatctttattaggctaggtgataactgttacccaaatggttgagttgctactgcataattctgtgttggtcaaagatgagaacaactttatccctgatgggagaaagacattttaatgttatcattctgtgaaraggagggtatgtcaggaggtctggtgagggcagtagggaggaaaaagacttgaaggaccataatttactacaaaatgcctrtgatctaacagagttaggatggacaagttctttttatgccgtctcttgagttctgttctccacagcacgctggcacacccctttactcaaatagcaactatgtattctggatttcctggaacaggccaactttttggtatttcatcctgtttttcccataagtgcactaatactgcttagactctatgtcccatttttartagtatccttagaaaaataactgctcttcaaagtaaatgataggtaaaatattttggagcatttggcagtggggaaataataagtattcttaaggcttaggcaccgaagtttgaatgtgccttcctataactggcaagtgctacttctggtagagtatcctaatggtttaatatataccattttaaatatgtcagttaaatcaacstagttgtggtgttttcaacttatttaaaatattgaattttttgttaaaatgagcaactattttttaattcatccatttccgttggaaacaatatgtttggaggctctccatttgtttctgtttttttttgtggtgaggaaagaaaaaaatactttatatctttaacctgttttttaaaaagaaagttggcatgaatatgtcttaagggaagttaaacagaatatatacccaaagtattaacaaatgaaaaacaaagactacagttttagcctactttctctttccacatatttcacttctcatttaaaaattgtatgcatcyttgaagactagaactgaggtgcttacaacagtggtttgaggatattttaaaatccctttttatatatttctgaatctggaaagggaatcattgatgatcttaataaaatataaatcaagatattgcatattaacgactttataaaacaaactgtgaatacatttgtcattatagattttcctaaccctctgcaaccaacagagctttcttgtagagcrgtgtattacagctttcctttcaaaatgtatttgtacattggccaaggaagcatctcttcattgtgaagatgttacaaatatcttgataggggaagaaactttttctgagcttattatagtggtgctagttaccttttaaagaagatacacgtctagtagtaaacacctagaatgtctgctataaaataacttaaaggtatagttttctatactctttaattttacagaagggaggcagcattctgagatatttgcatattgtgtaagattatgttgstaaatgtaagtatttaatttgttagaatcatagactcctagaacttgaggaataagaggagacttgttttacctttgtcagttttgttctgtttgaatttttaagaagctaatgaatttttagatccccattagttgctctttaaattattttaatactttataaactgattttttaaattttaacagtacttaaatgtaataactttataccatgtgtttattagttattaacttacagtagaaaatctacttgaaacagcttattattttaaaagaacaaaacgctttgaaaaagaatggtttattttaaaaggtgccacccatgaatgcaatccatattttaaaagctgagagttgggtaagacctttaagggaggtctcatgtctgagcgctttccatctacctgctgaagtctgatttaagtctcatctgctaccttgtatctttagtctcataaagaactttaagacaaaaattatggaataaattgccagaaaagctaagagaagttttgcttacagtacaagaaatacctcatataacacagactgtgtttcatcctgctaatgggatagcccaacagctttcttccatccgtgtgtgatgtctgggtatgcctatatgagaaataatacgtgaatatgcacctagaataacagctcttttaaagttttgtttgaactaagtgcaagtttggcaagatgccatactattttttgatagcatacaaattcaagcactaaaataaaagactacctcctggtaaagtgttgtacagtgtacttcctaatttagctgaagctaaactcaaaatttgaactttgcatagaaaatgttaggaattttttttgtctgtttaccttacgttttgcagtattttgtttctttatgggtgtatccgagattatgaaaagtcattgaagccaagtgtggggacttgatccctaagcagaattcactggattatcatgtcttcctgcctaacccaggtctctgcatgacaagaatagttttaatgcagattttgctctcttctctttctgagagacctgaaaagtttagctttccaaaggcttccctgcatgcgaggtaaatagatggagcagaactatcaacaatctataattaagcagcttgactacctgtcaataggaaatgccctctgtgtctaccacacaagtgaattacaggaacctcagagatactgcaggttcggctcgagaccacagcaataaagcagatgttgcaacacagtgagtcacacaaattttttggtttcccagtgcatccaaaaattatgtttatactgtattgtagccaattaagtgtgcagtgactttatgtctaaagaggacaatgcatataccttaataacaagtacattattgggctaagcacagtggctcattcctgtaatcccagcactttgggaggcaaatgcaggaggatcacttaaggctaggagttcaagaccagcctggtcaacataatgagacccccatttctacaaaaaattagccgggctaattttttaagttttcagcttaggcggaggatcacttgagcccaggagttcaaggctgctatgagctgggatcacgccactgcactccagtgtaagcaacagagcgagaccctgtctcttaaaaagaaaaataagaaaactttattactgaaagatcctaacgatcatctgagcctttagggagtcataatctttttgctggtgaagggtctttccttgatgtggatggctgctcactgatcaaggtggtggttgctgaaggctggagtagctgtggtaatttcttacaataaaacaacgatgaaatttgttgcatcagttgactcatcctttcacaaaagatttctctgtagcatgaacagttgtttggcagtattttacccacaatgtaacttctttcaaaattggagtcagtcctctcaaactctgccacggctttatcaactgatattatgtaatattctgaatcctttgttgacattgcaacagtgttcatagcatctttaccaggagtagattccatcttaagtaatcactttctttgcttattcctaagaagcaactcttcatttgttcaagtttgatcataagattgcagcaawtcaatatctttaggctccacttataattctagttctcttgctatttctaccatctttgcagttacttcctccattgaaatcaaacccctcaaatcatccatgagagttggaatcaacttctatcaagctcctatcaacttgatattttgacctcatctcatgatcacgaatgttcttaatggcgtctagaatggtgaatccattccacaagattttcagttgactttgcccagatccatcagaggaatcactgcgaatgggagctattgccttacaaaatgtatttcttcaataataacacttgaaagtcraaattactctttggtttatgggctacagaatggttgttgagttagcaggtatgaaagcaacattcatctccttatacatctccaccagagctcttcggtgaccaggtgcattgtcagtgagcagtagtgttttgaagagaatcttgtttttgaacagtaggtctcaacagtggactttaaaaatattcagtaaactgtgcagtaaacaagtgtgctgtcatcgcagctttatatagcgtaggtaaagttgatttagcataattatttaaggccctaggatttttggattagtaagtgagcattggcttcaacttaaatgtcaccatctgcattagcccctaacaagagggtcagcctgtcctttgaagctttgaagccaggagctgacttctcctctctagctcggaaagtcctagatggcctcttcttccaaaagaaggctgtttgttacccacacaatgggtgggtttgattgcttggtggatgacagtccatttaccataatcgaggattcarcaaggagattttattacttgtrataagaagaatgctgaggatagttcccaaagcaaaaccttcctgaacaatggtgaaaacaagcttttattgggctggttaactgagtcattgtatgttgaggtggagtaaaggcagcacccgagcagtccctgatgatgcttctatatatgctgcgtgtatagaaaatgggggctaagcttctctctgggcagggattttagtatgcattgaagggagtttgccaaagttcatctgcaactgacgcatctctagatccaactggtttttctggggctaagcttcttcctggaagtttttttgaaataacaaaagctcaaggtataacacttacaagtgagtgctttttcacagtggatacccaaaaacccagggaccctaagctacattttgtctgcactgaaaatctagwcttaaatagccaccttcatcagtgatcttagctagatattctggataacttgctgcagcttctccatcagctgctgctgcttcatcttgcacttttttttgttttttggaggtagggtcttgctctgtcaccaaggctggagtgcagtggcgtgatcacagctcactgcagcctcaacctcccaggctcaagctcctcagcctctcaggtaacttggactacaggcattcaccaccatatccagctacttcttctattttatgtagagatgggatctccctgtgttgcccaggctggtctcaaactcccacattccacttttatgttaggaagactgctttttcctttgtgtctcatgagctaaacctctatagcttccagcttttcttctgcagttttcttactctcttagccttcgcagaattgaagttagttacagccttgcgctggattaggttttggcttgaaggagtgatgtggctggtttgatctattcagaccactaaaactttcttcatatcagcaataaagctctttcactttcttatcattcatgtgttcactgaagtagcacttttaatttcatgcaagaacttctcttttgcattcacaacttggctaactgttttgcacaagaggtctagttttctgcttgtctgggctgtcagcatggcttcttcataggcttcatcattgctagcttttgatttaaaatgagagagatgtgattcttcctttcatttgaacacttagaggctattgtagacctaatttcagtattgttgcgtcgcagggaacaggaaggcccaaggagaaggggagagagtagaaggtggccagtcagtggagcagtcacacaacatgtatcgagagtttgccatcttctatgggtgtggttcatggtgccccaaaacaattaagattctaacatcaacaatcactgatcagagagatcgctggtggtggtggtggtggtggtggtggtggtggtggttgttgttgtttgagacggagtctctatcgcccaggctggagtgcagtggcgccatctcagctcactgcaagctccgcctgccgggttcacrccatgctcctgcctcagcctcccgagtagctgggaccacaggcgcccatcaccacgctgggctaattttttgtatttttagtagagatggggttttactgtgttagccaggatggtctcaatctcctgacctcgtgatccgcccacctcggcctcccaaagtgctaggattacaggtgtgagccaccgcgcctggccagagatcactgttcacagatctcatactaatgaaaaagtttgaattagtgcagtaattaccaaaatgagacacagagacataaagtgagcatgtactgctggaaaatggtgctgatggactttcttgacacctgattgtcacatatcttcaatttgaaaaacaaaaaaatgcaatatctaagaagcaccgtaaaacaaagggcaataaaacacggcatgcctgtaaatggcagtaaatcagaaagtaaggtcatcatgaggttcctatatcatgtgtgcattctgatttgataattctgattccatctcattttttacaaatgggtttgaactagatctccatttgtgttcaattttctgccttaattatgtgcccatacagatttaaactaaacacagatcttctgtggtcacaaattattgacctctgttatgttttcaaagcctgccaaatactttaagtaagcaaatctatccatggaaaattctataagggctaccctttggctcctaagagatagtttttggaatttttttatggttcagatatttttgtagctgattcaacaaaatgaactttttaatttcataaacattcttctcattgacaaggcagatgtgactaaaagagatgagaaataataagaacaaaacttgttactgatacatatagttgaattacacccaaaaatagttcaacagttattaaaaactgcttttttgagaacttttagctcttctccaacttgtaatcatgagaaaataagtgagtagtaacaggaccataaygtttttacaaatccagacacctttatgaaacatttaaactatccagaacgtaaaaaggagaagaaacaaaggctgttgaacagtaggagggctatataaacacctccaggacctctgtaataacctttctattgctctgagttctgccatacaaactcagcatgtgaacaaattattcatgcctcgggacatattaagttgttatggaagtttctggagaaggtccaccagctggtgtagagagctattttgcctgtcttaattgcatattccttagaatttctgtgatctgtaaaatcgcaggccagaatgaagcccccttttcttagcatactttctgtgtaatgaatttaaatatttgtgttagttttaaatgctgaaaggggaatgaaaaaaaattacaaaatgtacttatgccaacagttctcttatggttaactaaaagtatttttccccattccttaatttcaaatcctgtgagtttgggtaggggtcgagtgcttgtctctgttttccaaatgaagaattcctggcaagaagattaagtgactaagccggctgtgtacatggcagtgctgggcagcagcaacacagtagatgacactttcaagttatttttattatttggaccagatgcatctggttggcaccttgagccaatgagctgccctcccagaggtcctctggcacagaattggagttagtatgaacaccagagatataagataaagcatttcagagaacactgaagttaaattcagaagacctcattcacatctctgccaaatcacaactaccttaagtgagcttgtgaaaatgcgctttttgcctaccatacagaatgcttatcacagaagtgttattgcttagtactcaggctcaaattctggctctacaacctctgttctgtttcctcatatgtaaaatggaaatggcacctacattatgggttacatgcgaggctcttagcatgatttttggtgtgtaataagccctctattgataggaacagcagtagcaggtagactctatattgatatataatcagaggagttacaatatgtatataaataccgataatataaagtggaaagttatgcattcaattagcataatttaaagctctttggtaattacagaaaggagagattattttcttttgggttgtcatgggagtgttcctgaaagaggtggtttttgagcttggccttaaaggatgaagatttgggcatgccaaggcaggaggaattgaaagtggtgaaggacattccaagaagaagcagaagtgtgaacaaaattaaatgttttatcattgttattttattgatttttaagaaattatatttaattcaccttttggccatgtatgtatgtttatatgaacatagcctgctgttttaggttctgagaatccttacaatactgttttaaatcaagatatttttgatttctgcagaaaaccagtaaggttttcttatttccattttatagataaggaaacagacttcacactagtgattggtagaatgggagaaccccagtgtataagcactaaatttcatgtgtttccacagcactgcactgcctctgttagactttaagtagaaataatttacacaccgtccaccatattccccaaagttgctttcttaaaatgtgtggcatatttagaaaagttggagaaagtctcggtgacctcatatagatgtaaccccaaacccacaaataactagtcatagtacttaaaaggcagccacaaatcatgtgttttattaacaccatgtgtggtgctccatcttgccaccgttagccaagctcttgcctcaagtttgctaggtaacttatctttgtctttagtttattaaattaaaactgaccaataaatgagtatcaggtcttagagctgttcagcagtgtggtagaggaatcctattcttgactcttgactcatacatatttgaaaaaaaaataaggatttttatttattcatattaggaaattatgttaataaattcataatagtcaaatcatttaaatagatacctacttctagaccattgttctcccagcaattttctatttaccattagtatgatttcctttatacaggttttttttaatgtagataaaatatcctgagttgcatttataatacattttagttgaagcaataagacacaaaagctcatgttttttcataaggtctctaagacagatatctccagtattagatgaacacagtgtatttcccaggattatgctattgcatacttgttacattttgaatatgaagttaacatattctgcttgaaatgtcttgattacattgcatgttctgaaaactcaaactattccaataaaactgttacttcaagagtaatatgactatatgatgtgacatttatattaaatgtgattttcatgtactgtatagggttttttgtataacaaactaatttcatccaattctggttgcattgtaaacttgggggtgagctaaagtgatttgwcataaatatcccactatggaatttattctgaatgaattgtagcatatttctcatttttaataatataaggttaatatcattcagtatgaaatatattttcaaaaatgcctccccaatgctgtcactattgtataaattttaacttgatgtctgcattgcctaacactttctgtactttatctgctgttcttaatattgctaagattcttataggaatatatgcctttgttgcccagtgtatagctagtatcaagaacacttgttaccattttggaaatgaagtagtattttcaagctaccaagacaattgaggagttttgaaatgttaataattctcattatgtggtaacggattttagaaattactgcatttactttaaaagcccagtgcatctctacttagtcctttattgatagtgttcatcagtcttcacaggtgtatgataatgtgtaatgaaaagtacagcttttcacatctttgctattcacgacgaaccctgaatcctcatgtttcttcaccccagcacagtcctttccctactcctctttgctaggcaccagtctaggcagacagagtaggtaagtgacattaggaacaggacaagattaagtgacacctgggtgctasaargytgaagaamggaccagaccaattctacgtcagatttcaatgtgaaaaaaaatacttttgatgccttcccgtctcatcttttgcatccctcattatctcttattctcctgatgatcctccacatctgatagaagagttacagttcttttacgtcagggggtaactgtaaccatcaggggctctggaaccccacttatcagcattgtggctttgggcaagttagttaaccactctgtgccttagtttccttgtctgtaaaattcgaatggtttgtaatggtgccccatcccaactggaatgtaaaatgcattaaacagtgcctaccatatagtagacactgtagaaatgttggcagcaatggtattatgacaataggttcatattacaaattagatggttaaggccttatgggtgagactttatatccacgctaaaaggagatcagtaaatgttgcatttactgaatgttgcattaatgaaaaacttgcctttacttgtaagtgccccttacttaaaattatctctttttcccccttaaaacrttaattctttcagagtatactctagtaagggtgttaaaagaaaaaaaaagatgataactaaaccaaacaacaataaggtgggaatgattagtggctgcaccctaggaatgttttttatttaaatcatattaatttgcaaaattccaggcagcttggaattaggaagaggaatctgggccggtaacctgaatatccaggtcagtttaacttctcacgtcaaagaaaatactgctttactataagcaatgagaggtccaagattcagtttctaccatatattgactcctagtaactaggagtagtcataaccattaccccaggtcccacagaacatttagcctgtgggaccctctttgacttgagatgacctgacttcttgggttcccagatgctggaaatcttgcaaagagggcctcaaagtagcttcttgatctcattaagttgttctctcccctcaccattgtttctctaaaatgtttggctggctttttaaaaatagtacataaastgtattatttctccttaattaccacacagtgtaatgtggtaaccattggatgccttatcaaatatgtttgagattgagcccatttaaaatttattccaatacagttctaaactccattcatgcctaaggattgtcatttactgtaatatagcatggtcctcagtcttccactcaaaggaattagaggaattaatgccagtcattttcattaaacccttttaatgttaaagatcataatgttcttaaatgttcaaaatatacagaacatatgaactgtgacattgggctccatttcaaaatagcatgtttgcatatccctgttgtggctgttttccacttctaatggtcataaaaccctggcttatatttagcagaaaatcaacgactttgacagaggagcttagcctggtaacagcgcaaattaataaccatctttaatagtagtgagaacagtctttgaaggggtaagccaaaacctgacccccgaaatcaacagtattgtcaaagtattttacggtagattggctgtttaatctactatttaaatgtacttactagttttatctaaggagacaaaaccagtaacttacctttataggaaatactttagttaaactgtagtgtaattgcagtgctccagattaactaccctcaagcagtaaactatattggttgcagtatagaaaggatgtctgcttagtatctgcataayatcaaccattgacataattttttagatttatttttaggaccttccaaatacaggatactattctaaaacctaataagaataggggagatatatatatataaagctatgctttaagagttcatttagaaactttattttactgtgctggaaaatactgtgtcaagttgtacttaaattcaaagacaaaataaattaactgtgaccttaaatcaaaatttaattatgtagtacctatttctttatcttaaaatgtgaagcaaatagttatgagggcacagttggtgtagtgagaaaatacttctctagttactgtaattatgggataattaaataacctttctgaacttcagtttcctcatctacaaaatgtgaacagttcttgtactgcttacttcttagtgtttgcattgggaatcaaatgagatgataatgtgagaaaatgcttctttaattactaagtgtttttcaaatgtctgtgaagtcctaaatacaaatcataaaattagcaatgtagaagactctaggctgcagctacacatgtgtatcttcgaagagtatttacccaacatcctttgaaaagcaaagaagtaacctgagctttcattgacacacaaattttcatcttaatttttgtgtcaaagagatgttgcttcatgtagctgataagctagcatttattgacttcttattgttattttagatattatttctgctaatcaacccttatttctacatgtcatatcatttaatcttcccaacaatcctttgaggtaggtaatgttagtagcttcattgagggaactgaagtagaattgcttaaaggattatctaaaaccacacagctaataagtggccaaatgaagactgaactcagagctgtgttattccaaagcccaggcagctctcctggcccccaaagtaggcaattggaatcacactaggtataatatagcttatcccatattaaagcaccccctcacccaaatcataacttctaaaagacctattgtcataaaatagttttaaaacttggtaccgtaacttttagccataaaagggaccaatagcctttgctaattaagagtactgacagattcattacctgacttgaatgcaagtgaatgactggcctctcagagaccaccagtggttacacagtggccaaattggaaattcattagccagaataagaagtactggaagaagcagctgctaacttctaccttctctttttgccacttccctgatcagatctacagaaccctgtatctctaaatcccactcatccttcagcttcccagcttgagcataactggcttttttccttaactaatgataagtatcaccacatgtttaaagaattaagccattttaattgaattcctacagaagccctgctgaacagtagatagcaaaggaaaagtgtatttgtttaactataactcagagttatatagtatgcctcacattctcacaaaaattattttttgactaagtttctagcctgagagcaatagtctgcatttatgggcctaggtacacattctttagagttgggtagcttcccctaataattaacacggttattgaggaatgctttttaaccattcttgtattaggatgccacctataaagatatcatccaaaatgtggcacattgtcaccagaagtatgcagaatgattactggtagtacaatataaacatttttaaaaattataattataaatgttaattttctgttaggaaaagtatacagccagcacaccaaagccatgacttcatgattttttaaagttgaggttaaactaggtattttatttttaaaaaagttaaaagaaatgtcaaatgaagaacccttcagttagtacctgaataggcaggtacacatataagtgagatgtggaaaacagtggcctgaaatacgcatgatgatctcagcactagttgtctacagtgcagcgtcctgtatgacagagtcttgatcatcctgcctttgtggcattctgtaatgaaaactttggattggctattacttttgttatagtgagcttattagggaatattttgtcccttgcagaatattttgtccagcttcaaaacagccttattccttcaaaataaggagtagtcccagagtctgttttgtttttgtttttgtttttgttttttgtttttgagacagagtctcactctatcgcccaggctggagtgcaacggtgcaatctcagttcactgcaacctccgcctcctgggttcaagcgattctcctgcctcagcctcctgagtagcttggactacaggcacccaccaccaccctcagctaattttttgtatttttagtagagacagggtttcaccatattggccaggctggtctcgaacccctgaccttgtgatccacccacctcagcctcccacagtgctgggattacaggcatgagccaccgcactcggcagtcccagagtcttatttccttatttttcttataatgacatattcattatttgccagctccttcacaatgggagaggctctgcagaatttactgtgatgagtttgcaaggtgaaagcaaaagaacaattatttttcttggtagtttaaatgagatcttgctatggaaaagtctgaggtaaaaccccaaagctgtttctcccccaaaaaagtaggtatttatttaggaagtaaagttggcaacaaggaatatgtaaacctctcttaaatatgacatgtatgtttcattaggatttcaaagtaactgtttatcaggtaatatacagtactacctgtgtttataacttctgactttgactgcatgagaaacctagacttgaaggttttcttgacttttgatcttttaagtgtgttttttactttgtggttgtgtttgaaaacaatttaacttgaatggctaagattcgtgctttgggaaagttttttgttgtttaatctgttggttttcattgaaaaactgctgctagaaacaatgtgaattttggaatccaactcgcttggtttagaatactgggtctcgacttctcactgctctatgactttgagcaaattggcgcctgactgagcctcagttacacaaactgaacatgggcctaacaatccttacttcatggggttgcaatcaagattaatgtaggatactataaaagggttcctgcagtgttggacagaataaatggatggtagctcttagttttgttttttttcagtctatagctgcactgtgatctatggttatgtaaccccaccatttatagcctcactatacttctaagtagctatattagtacgttctcacactgctataaagaactacctgagactgggtaatttataagaaaaagttttaattatgctcacagttttgtgagctgtacaggcttctgcttctggggaggcctcaggaaacttacaatcatggcagaaggtgaaggggaaggaggcacakcttcacatggcctgcaggagagagacagtgaagtgggaggtgctacaaactttcaaacaaccatatcttattagaactctatcacaaggacaggaagggggaagtctgcccccatgattcagtcatctcccaccaggtccctcctccaacactgaggattacaattaaacatgacatttgggtggggacacaaccaaaccatatcagtagccttctttccttgaacttgccctrgagagcctccttattcttgctccacatggaccattcaggattttgctattcactgtgtatttttaagtcatttctcctgcccacctcctttcctgccagttctgcatcctatttccccctttatttcagtctttactgttgttttctctggactttcaattgttagcacacacttcagcagttgtttttctctacttccttgattcaaatcttatttctccaataaaatctatgtacacaagagcaaagaagactgtacctatacttttcccatattatctacaattgcttggcatagtgccagaaacaaaaaagatgttaaatcagatgcattgaaaaaatgggaaagcagtggtcttaaaataaaagcccaaaacattctgatacatttagtttaggtatagttatactatatcgagtacaatactaactacccagtaatggaaatgtaatggagaaaagaagaggaaatacactaaatcccttatgtgagacctagattcaaattctgtttctctacttgcatgacattaggcaagtcacctaacattaaatgtaaaattgcagggtgcaggagatggggagaacaaaccaaacaactaataagtacaacagacttggactctgaagattgaaatcttggctctggaactaaataactgcatgcatcttcttgaacaagtcatgcatctcttgatttccctcatctctaaatttagcgtgacaaaatccatctcacaaggctgttaggattaattagaacttgtgtgtgtcgatgcctggtatattgtgggcatatactaaatgttagatttatttatcaaaaaaactctgtggatcttatgtgacctcattgtagaaatgagggactttagttagccaatcactgaaatccccttgagctcttagttttgggcaggtataacaaagtaccatggactgagtggattgtaaacaatagaaagttacctctcacagttttggaggctggatgtacaagatcagggaactggcatggttgggttctggtgggttctctgttctgggttacagactaccaacttatcactggatcctctcatggcaaaaagagaataagaaagctctccaagtttcctttcatcatattgttgttaggatttaaacatatcaatttgtgggggacacaaacattctatccataacaagttccaayattctacatcagtcatctcagagagaagataatagataaagaatggatattgttctttttaagctcactagggattcctaacttatctacaggaaacagttgtaacaaatagagaaaaattgatgcctctaaattaaatatggtactagtaaaatatgtattattcatactatggctttaccttcatagtaataccagtggatatctatggcatcttcctcctgtgttttgatgtttcattttgcccagtaagaacctccstatattgcatgcttaaatgataaagtatctcagtaataaataaagcagagttgaacctgccaagttgaccgacagttcactggtagaagaagagctatattttataatgcatacatcaggtttgacttctccttaatattatacatgattaaacaagttcaaagagaatataacattgattcactgcatttctcagtgaaggattctgcctgttgaagagaagaatgtaatctattgccaattggggttttgtatttgaagtcctctgatttctaaaataagcayaaattgttttcttgtctttcatcttcacagcctttctatgcatagaaatcttgaatatggtctttttctggcaagtgtctgaataagggtttacaatgccttgtttatctgacaagcamccatgttggcaaatatttcaaggctccagtaatactaatgtgagtctttaggtaaaggaagctggttatctgtctggcacatgggaagacttaagagcattgcagtaatgaactatttccttagaatgccaggtttaccagcaatcagatatggaggccgcaattaatacattaggatccaccaggaggtcctaaaattgggtcttgtagagtttcaaaagagatactgttactgtgcccctccttttcccactctgttggccaaagttctgagtatggcacttccctccttgcttccttgagatctcagcatttagtgaagtgaaaagttctctgctcacaagaaagatcctccccscaatccggggtttgacagacaggtctrtatggtgtgattccatggatatgtggtatataatatgccagaatgtttgacctaccaggtaggaatctaaccatatcttcctccacaagcactaacatttaggattttggtttttgtttttcctcaagttgttattttgaacatcttatttgtaagttctctgagggaaattgaaatttaaaatatctaagacaaagaggaaaaatctaattgagttgatcatttctgagattactttaagtctttgtaaacttagtttaaattttcacatttgttccaagtaaatacttagaaaacttaagaactgcatttgatgccacagttgatcttctggcagcagatagtaaatgggagaaaagtaaagccagtaaaaacggttcttaatagaaatgtaaaggaatttaataagtatatattctgttcttaagcctttgaaaaccatgagagattacttttataaaaatatatatatttttttttgcgtgaactccacttcttggagctcaagttcttggcccaaattgtctctgcaaatctgtattatgaaagtctattcttaggtatggtttttaaaggatgacccctggacagttatgttccgacacttttaaccatgtaaccctttcttcacacaaaaatatttcattgaagtacaatatctacagtgagccccctctgtttgaagtggggtaaagaaagaaaaacagaagtccacatatacacacagacatgcaacatgtatgcataaatctgtggtttcaaaggtcacagtttgaaaatcctgagtattttactatgttttcattagaaggacagccccagtttttcaaattctgaactagaccttgagcaataattattttaaatttaaaagtacaaactacaggaagaagattcctgaaagatggtagcagtagtgacattgttctttaatctcatcataaaacagagcaagtaggatatcaaaaccaaaaacctacagatagcaacaacctcaaagctaagtatccttataaacycccaaatactagcaggtaaggacaaactgccaacaactacaaaatcagtgtgggatcagtaaatgtgtggaaggaagcaaatgtaaggaaacaaggtggttgatgggtcctgagaagaggaaagcccttgaagtgccagcaaatactcattggaaagcacagcaagccaattacatagcaaccactgagattgcttgggcgtttttgtaatgtttaattcataggtgaataaaggagactggaaagtgattcagtttgatagtgctaaagcagtctgggccttaaaaactcctgaagcagacaaaccaaagttgtcttccagaacaaatgctgtcactgaaggaagctacttgaagtagaatccaaattaagcagtacaggacaaaaggggagaagaaacaaagtccatataaaaagtgggcaaggacaacagagtaggcagtcccacaaagtgggagaccacattttgtaaaatcactttgtgaaaacaattgaaaagacagctttggaatcattaagttgggaagaactaggctggactgtccctttcacagtacaggaaaacatctttaaaaaaaaaaaaaggaaaacaaaaatggttaaagcctttataagataaaagaatacagggcaaaataacgttcctacaatgaaaacatgccccaaaaaatccacaaaatagattaaaactatgaactattacttcaaaacaagctaaaagaagttttttacatgatatccgaaaggaaagacaaatccaaattagaaaagactcagaaattaggtgattgagtaaaaatcaatggagtatataagatattttagaaaggaaaacatgagccacttactttctgtccagccagacttaccttcagttacagctcccccagacaatcaaatattgctcacatgagcccttgctgagaaatctactggaaaatgagtttcagacaaccaaaatgaaaaacaaattgtagagacatcagaataaggactgrtgaaattttgtttcttagcacttagatacaggaccatgtgactgagtcctggccaccgacaaggggtagcagaaatacaaggtacttccaagcaccatcctccatacttttttcactgatttgtcagctaggtacaaaggatccagcaaagtattctttgtcaccaatagaaataacttcacagttattccagatatctttaaataatgcttcatcacctcattacaatttttagacctagcagattaaattggattttgtcatttattattaaatctgtaacactttttttttttttttgagacaggattgctctgtcacccaggctggagtgcagtgccgtgatcacagctcactgcagcctcaacctcctggactcaatcctcccacctcagcctcctgagtagctgggaccacaggcgcacatgctaccaagcccagctaatttttttattgttactttttgtagagacagggttttgctgtattgcctatgctggtctcaaactcctgggctcaagcgatcctctcaccttggcctcccagactgctggaattacaggcatgagccactgtgtctggccctgtaacacaaaagtttttaatcctttgataactttatttcaatataatctattttctttgtgatactgtgcattttctgttatgatttaaaaatattatcctgagaaaaggtccatatgcttcactagactaccagatgggtccatggcacctgatttaaatggaagaagacagggtctttaaattaaatgggagcagagtgcctttcccccactctatcaatacacattgaaaatgacttgagccagaaatagtttttgtcatgtttaaatgggaaaaaaaagcacaaaggaaagttttttattttattcaaatgcttttttagaaagaacattaatattttcttaatgttttagtagtttttcattattcaaaatcagtttacatggtctttactgattatccccaggggtcaaaaaaagcaccaatctacctttaatttttgtggttgggaaagctagaccaaagtgaaaaaaatttttttgtagtatttccataggtttttggggaacaggtggtatttggttacatgagtaagttctttagtggtgatttgtgagactgtggtgcacccatcacttgagcagtatacactgaagccaatttgtagtctcttatctctcacccccttcccaccctttccccactgagtccccgaagtccactgtgtcattctcatgcctttgcatcctcatagcttatctctcacttaagagtgagaacatacgatgtttggttttccattcctgagttacttcacttagaataatatgccattaattaattcctttttatggctaagtagtattctatcatatatgtgtaccacagtttctttatccacgcattgattgtggacatttgggttggttccacatttttgcaattccaaattgtgcagctataaacatgcatgtacaagtacctttttcatataatgacttcttttcctctgggtaaatacccagtagcgggattgctggatcaaatggtagttctatttttagttctttaaggaacctccacacatttccatactggttgtaccagtttacattcccaccagcagtgtagaagtattcccttttcaccgcatctatgccaacatatatatatttttttatttttttgcgggagtaagatggtatcgcattgtggttttgatttgcatttccctgatcattagtgatgttgagcattttttcatatgtttgttggccatttttatatcttcttttgagaattgtctattcatgtccttagcccactttttgatgggattgttgtttttctcctgttaattgtttaagtaccttgtagattctggatattagtcctttgtcagatgtatagattttgaagatttttcccactctgtgggttatctgtttactgactgaagtgaagatttatttcttacagtcattctagtcctcattttaaaatgcaaatttggtacaaagtactcttttctgaagggaacgtgcagatttcagacacaaatacacgttattgtacatttctaataatctatcacaaaaaaatcatagaattataatgtataattttggaatttattgttgaagggggctttggtgatatctaatccaccttcctcatcttcataaattaaggatctgaaaagtttaaatttayatatggtcacatttaccctggtcacacaactggaatggcagtctagaataaaactatgctgtttccacttatgtggtaataatgcgttagaccaattacagtcttacacagtcttcatcttcctcccctttcctccttccttcctgtcacagcagaaaaggtgtcagtgcttctgtctgtggtttaatcctccttcctgtttggacattttgtatgccccgcccttcttatcccccattcacattcctctctagcttttcacatccagacttctagaaacagaaacacattgtctctcctttaatttttttatttcttaacccacaaccgatgacaagcatttcactcaaattgctcctctcaaagtcaccaactgcattttgctgaaagtgatagaactttctccatgttttccttcaccactctgcaatacacaacactgttgaccacattcttctcctcgaagtgctccttctctcagcttctgtgataccatatgcccctgagtttcctyttgtctggttgctctttctcaccctcctcatctgttgccaatacctttaaatgtcagtaagtgtttctcagaactccctcctaactcccctccttttgcagtgctggttctgtcataacctaatccactcataggggttataaagaccaacagttgtgagcactgttgactcacaaatctctgcaatacagccctttttacctgaatttcatacctggctggcatctgcagatggacatgctacaagtcctccaaactcaatatgatccttttgtgtctcaactctgagatgtattacttctttccatgctcctgtcattaccaccatcatcttatacctcagtcactataaagccctgtaactggtctcatgtcctcaatctcagctatatcctcactgctatcagggtgatctttttcatatgaaaatctgttgttccatgaaagggtcatatatgcaaagtgactcctaaactcagaaggagccaagaaacctaaggataaggctcgcaaatccagtttttcaggaaatgrtaatttatttgggaacttacagatggaagcatactcttgggtggcagcaagacaggtagatctgcacaccactactgcccagaccggggcttttataccacagggaaagggtttacaggctctatagaaacaatttaagacaacccaccagaacaggcaagaatgctaggtacatcatgcctgtgcagtaatttgtgctgtaccatcaagattgctttgatctaaaagcaggatttacagtgagtacatgttcttacactaaagacagctagtaaaataagaatcaggaggccttcacaggactggagttaatcagaagtcagcattgtggattagtattcaagatggagtcacttttgtctaagcatctgtccatgttcacttatcttttcaaaacctctcctcttccttccctttccatattgtgttctgcattgtctaagtgacccaccaagcaaattttttgtaaagtggattttcgttcccttacctaacttactttcctcaatattgggttgcctttctatctaccaaacagtaggattcatacctgtctctgagtgtttgtggccattgtttttgaaacttaagaaatagaattggtgttttgaaaacttggatattgtcgtaacactgatagtgattctgtgggcataggacattgaatgtaattattatgctagataccctaagacttatgaaattggcactaaagcaccattaagagatactgacccacagtttaaatttactcaggccaggtgcagtggttcatgcctgtgatctcagcactttgggagaccaagggaggaggcttgcttgaggccaggagtttgagaccagcctaggcaacatagtgagaccctgtttctacaaaacatttaaaaattartggggtctggtggcatgtgcctgcggtcccagctattcaagaggctgaggtgggatgattgagcccagatsaaggctgcagtgagctgtgatcatgcccttacactccagcctggacaacagagcaagaccctgtctcaaaaaagaaaaataaattttaaaaaattaatttactcaatctaaatggtttgatttttaattttaccatgtttggtgtttaataaactattctttgttatttccattctttctgttataaaagctgtcacgagttactgcttccaatatcatacataaaacaggactaatcaaattggattgtgccaacattttaactgaggagtcccagagtatttccatttgtagtgttgatttaattctagaagtttgtgttaagttccttattgtttcttttgttgaaaatattctctatctttattttaacattatttgatgaactaaagagatgtaattattaacaaaattatcattttaaaattttacattgtgaatacttagcatgctgtggtcataaacagtgtaattgtgtttgcagtgaataaattgttagcctaaaatagaaagaagtcttacatgaattaggacaaaatttatcttgatgttttgcaaatccttagccagctgtgaatatacaactaaataatactacacttcacagagaaagcaatttatcatgtgtgaatacatttttaggagcttttgtatgattagttttgaaatagaaaaatgcaacttgtgtaagtagagaaatttcacaaagtaatagctaaatgtgtaccacatttagctgtgttttagggaggttgtttttaaaaataatttggagtcactaccttaagccttgttttattatttaccattatttctcacaatcagtatattacatgtatacttgtttatttgcttactgttatcttcccttcgctaggatataagttccatgaaatgaagaactttggacttgtccactgccaaatctgcagcacatagaacagtgccaacatatagagggatcttaggatatatttgttgaatatatgaataagtgaacaagtaaattttatttagcatcttttttactttttacttatcatgttttgaggatttctccgtgttactgaagagtaaaatacctttttaaggaagaaatcatggtgtacctactgatgtactttggcagtgtccccactcaaatctcatctcaaattgtaaccgccataatcgacacatgtcatgggaggaacccagtgggaggtgattggatcatgggggcagtttccctcatgctgttcttttgacagtgagttctcacaagatctaatggttttataaggcgcttttccccctttgctcctcacccttctctctcctgtcactctgtgaggaaggaggtgtttgcttccacttctgccatgattgtcagttgaggcctccccaggcatgtggaactgtgagtcaattaaacctctcctccataaattacccaatcttggatatttctttatatcagtgtgaaaacaaactaatacacctattccgtcctcagcactttttgtcaatgttacaagtgtcagttctttatgaattcataaatccaataaaaagtgttgttctagtatttattatgtggcagacatcatcacagctgcctagtatgcaaagataagtaagacacagtgcctgccctcaggggactcctagactgtaaaagacaggcaacaacataaccaggggtaaggataatttattttgctggttaggagtgaaaccaggttttacaaagtggctaaytctgagaaaatggcaacagactgatcaccaaaggaaatttaaacaaatatatgacaattagagagtgatagaagaggatagtgatattcaaaagaaataagactaagtacaaatagaacacacagatttccaggtcccatcagggaacaagttcaatataagtcagtagttttcatacatcaagaactgatgtgaaacaaaaatattaagaatagagcctccaaaaccaaaaaagtaatatttttcttcccgtagaagagaagctggtctttactaaagtagcaaattcaaatctagtctttactaaaatagcaaattcaaatctgttctcatttgatcatccttttacctattatgtgcagagagtcatcttaaagttagattacaaaaaattaagaggtgagtcatgatggctcttgcctataatcccaacactttgagtggctgaggcagaatgatcacttgagcccaggagatcagaaccagcctgggcaaaatagggaaagcccatctgtacaaatatatatatatatatattttttttttaattagctgagcatggtggcacatgcctgtggttccagctactcaagaggttgaggtgggaggattgcttgagcccaggagatggaggctgcagtgagctgcgatcataccacaggatcctttgtaatagtgtcacaggatccttcaggtgttgcttttctagccagaaacttctgtggtaggtggtgcctttgcttgggttttgcttgggcccactgggctcattccacccacttggcctggaatcagctgtgcttgactcatgctaccagcctggatcccacatctgccaagggtgagccaggcacggagcagtgagaggtgtgtgagcaaacaatcatggaatctagtcactgtgcatagccaggcatgccagctgctgtggtggggcaggcagctccatgcaagactgtggctagatcagacgtaccacaagtgacttctgctacaggcacctgcatctgaacaatgcatctgaacgcagtggcaaccagaaacttggagaccccaggaacagcagagcctcaaaaaggatgtcaacagtcctagctcagggagcccctaggcctgggctccccagagggccgtagctcttctctctttctcttcacccacaagatggtgagttggggggtagggggggtatgtttcagcactgtttgtattacagctctttcagtctcaccatttggtgggtcccaagttcttgttccacatccaggaagaatgagattcggacaactggagggtgagcaaggtggaaaggagcttcactgagtgacagaatggctctcaggagacctgaaatgtgtagctcctttttgcaggcagcttgtcccaatgaatgtccagctctcagcagagaggagacctgtagtggctagctcctttctgcaagcaggtcatctagaggagtgtgtaagtctggctgagtctggggtttttatgtgctcagaatggaggcagtacatgctgactggtccatgggctgtcacgggtgggcctggagaaagcaccatctggttggccaggtggtcatcaatgaagttctcactccaggctgcagactttgctcagaactggcagcccagcccacaggcttcaggccatccccagcctgaaggtggagtttcactggggacctgccccttcccgcctaggaacctatctgcttttcataccatccatggcacccaggctgtctgtgccaagaggcgcccacaggtccatgccaagctgcccgcagtgccccyggcctccctcctgcactcgtaggtgtctaaagtctggaaggagcctgtgcagcagggggctggtgtgtcagtgctgccctgagcatgttcatacccagctgggttgtgatagcacccaggcccacccacaactttgctccacctcagagtggatgcccagagctgggagaggccagggagtgggaacaggtactttsaagcctatgggggcagggagcttcctaggcccccaagagtgcagggatgccttggtctggagccatggctgggtggctgcagctgtgcctagcagcacagggctcctgccccgccagcttagtagagggtggggctcccgcctgatcccagccccsaccggttccatggagggtgcagccctcgctgcgcctcccccactacagctggcatccgtacagcagctgctgcagagaggccactgccgccatgaacagagcaagaccttgtctcaggaaaaaaaaaaaaaaaagaagaggattcagagatccaagaaaggcataaaggtggaaaataaaagccattttaaatgctgtaaaattgcttagtacmgaaaaaggatttctaccttcctaactttccagtaactgaagggcattgacaaaatggttttttgaacwgaaatagaggaaagggccttatatgtagcaaaataaaaatgaaactaagcattagagaaacctytctagtgtaagaaatattaaccaaatacttgaaagtcagtaattggcgaaactgccttctttgatttagggggacatcctgcattttgttggcggtctaraaacaaagatttattgtttccaatgatttggataaatagggtattctttgattcaaaattattagatacaacattttagcaaatatatgaagtatcaatggcttttgtaatcttaacatataaataatgasagttagatttggatttgggttttgatcttcccaaaggaaaattaaattcatcaaagcaaagaagcccagctggcataagcacttgacagattcaaaaaagataggactgttggttgtctataatatattctattctcaaccttttgtttcagctttaacatttctatcctttcaaatgctactctatcccgtccacctgcatcaratgagtaatagcgttttacaagtmgtagcaatttttctgaatgtaagacaatgagtggccatctttagaaggaaattgctttttaagaatcaggctatcgtttctcatttgaactaattagttggtgccttcagagctttgctttcatatactatgtatatcgtagttgtactacgtcctttgcatttgtttccatctataaagagtacaattagcctttttaatgcttagttcagtcacaattaaagctcccctaatggttagggattggtctttccaaggctgagaaggtgtttttaattattcattcctctgtttgtgtcttacagcagcctcagctgtgctttattattcaaaggttaatgcaaactgagaagtggataaattaaatctgcctggcagccaacaacccaacrtgttagcagacactgtaagatggggatgggcagtgtaagttatttccattattgcagcactgccaaaagcaaaaaccactaaatccttcaaagatagccgacgttgacaggaattattaagggatactacaagttgatggttcttaaatagcagatcttctgtaaaatctgtgtttgttttgcttacaaagagaaggtagtggcagaaatctgagaggcaataatagctactgtagaaaattgatgtasataccatgactagtgaactctgtatagtattaaatcaccaactcgagtgctagaagtcacttctataaatgttttacaacagccaactgcaaaatctcacatgaaagctagggcataatagaccatccttagacaactaagcaattgagtagtgaactgtgacataatgtgaaagtgctgtcataacttcactcttttgagcaacaagatgtttctagagcctttcatttgcttccttttgaaaatgtgtatttatagaactcagaattttatagactcttaagagggtgccctctagaaatactgaccacaaatgatgtggaaggaaaataactcattttatcaagggaagtagagtttatgaatataccaaaagccaaaaagtaaacttgcgtcttctgtttggttgcttatcatctctttccaccaggatattctgtgtggctcatctcttaaaaacttgtttccagctggggctacacctccaccaagagccttcagagctcaattaattaccttccatcacttttctgtggaacagaaaaggaagataaacctatgtcatgctgcccacgctgttctygactccctttgaccgaaaacccatctgtcttcctaacctttgctgatggactaaaggaaagaaggaaggataggtgatgaaatctgaaatctgtgcctgtcattgacagcctggattattattatttttttttaacacaaagcctaattctttcatgaaagccactgcaaagttttaggaaatccaggtttatgagattaaatagggatttaaggaggaaaaaagtaagtagagcaacctgatttgagaataataatcctatctcacttagttgtcactaaggttaaagaagatgatgaatgtgaaaatgttttgtcaacttgataagcctatccagagattaaatattgttaaataaattgccaaataactaactgaatgttattatataaatattgttagtttaattgctaagtgtttaggagatattaggacatacctataatttcttcagactatartaactctaatctgtacttttattggcacttgtttgtaattctagtcaattctggtctcttaaacagaaaggtagtgaactaatgttgacaccatttagtttatcattgctgctatggtcttctgtatctcctgctttcagtccacactaagccttgctgtcagagtgttgcatggaaaagaagatgagcttttcagtgctcgtctaggtttgaaatacagtttcatcatttactgtgtaaccattgccaagccactgaatttctttgacctttagttttagataacatttaagtttgcagagtgacagtaatttgaaaaatatatgtgaatgataatacttagatttttaaagaacctactctttgccagacactacatttgacactgcatgtatgtaaatataaaatgtcttaattcttattataacttcacacggtaaaaagtgttaccttttttacagataagagaactgaggctcagtggtatgaaaggtgtctggcttaatgtctggcacacagaagatgctcagtaaatggtgaatattcttatgtggattttattatgtgtttcctatttagaaatttccactagtgcctatcaaacttttaatgtacacaccaatcatccaaggaccttgtcaaaaatgyagtttctcattcagtaagtttgcccagtgctgcttcttactggaccacactttgaggccctcagtgactccatagtctgtaatagtagttctatcatggtgattctagttgttcattagattctgattcatctggtctgatttgggatcyaggcctttttgttgttggggcagggtgggagttccagaagctgttcaagctctttttaaagcagtggactccttttattcaaagagtatttaaagaaattatgtactgacaaggtacacaaacacagcggagtttgtcttgttgaatctcagctggggagggagcagcgaacttaatgaccccaaaagacctcagtggagccctgcagctcctaggagcaacaaatttgaatatcacggttctccagagtacttttgcaattctttattacgtcatttaaggccctacactatctaacctcagccatcctggtatatctgctgttcttccaargggcaacccgctttcttctccctgcctttttccatgaagtgcctttagcctgttatgctttatctccctataccagttaaaatccacttcacctttccagcccagcttaattgcttaattgccaccccttttatgaagcctttccctggaggagatgtagttcatgtcagaacctcctgtgggacttgttcaaaccatatacttatcctgagagaacctaatgtttctttttctcaggtcggtgctgaaatgaaacatggtactactgtggtataagacagggtgaagaagctcacctaccaggaaatgaaaacttttttttttacagggttcccatagcatcttgattatgaatcctgtggaacaaatacgtcttaccttctctcttgttgcccagacaggaagccctttgggaatcaagaatgttctttatcttgcctagatcacagtacagtgatgagcactgatgcaagatgtgtattactccattttcgtactgctgtgaagaaatacccaagactgggtaatttataaagaaaagaggtataatgaactcacagcttcacatggctgggaaggcctcacaatcatggcgcgaggtgaagggggagcaaaggcaggtcttacatggtggcaggcaagagagcttatgcaggggaactgccctttataaaaccatcagatctcgtgaggcttattcactgtcaggagaacagaatgggaaagacccacccccatgattcaattaccttccactgggtccctccatgacacatggggattatgggagctacagttgaagaagaaatttgggtgggaacacagtcaagccatatcagtgggtaactactgaaaataagtctcaacaccatatagctagtattttagtcctgtgggagtcttgatttcctgaagtaatcatagaaaagtttttaagtgagtccacttaacactacctttttttttttttttttttgagatggagtctcgttctgtgacccaagctggagtgcagtggcacgatcttggctcactgcaacctccacctccagggttcaaacctcccaagtaatctcagcctcccaagtagctgggagtacaggtgcctataaccacacccagctaatttttgtatttttaatagagacaaggtttcactgtgttggccaggctggtctcgaactcctaacgtcaagtgatccacccacctcggtcctcccaaagtgttgggattacaggcatgagcctccacgcctggcctcaacactacctcttgttggcaatcaatcaatatcttttattgttggattattatttacagagcctattttagccatctagcacttttcttcttgaacaggtctgacatttagcctttcttcccctattaaaacaaaaacaaaaacaaacaaaaaaaaaacctctcttgtttttgttgaagtagtaatgtgtgtatatcatggaggtgagaggattaattgtaaagccactrtttcagagtatgtgggaactttggcctggcgctgccttcagatgttataggatggatgatgcaaaactgaaggtattcttcactgaattataaaccaagaatggtgggacttatcaggtcatttgtgcatttctttcatgatctcagaatttaatggggagaagtatgggggacagagagagacattagcatgcaagatgtcatacagctggtatagaaaatggaaattagagcctttaaagagaaactcttactgtttccatggtataagtgcagaggtcaaggaggaggtgagccctactagtttcttgctttgcctggtaacaacagtagtgtcatgggatccttcaggtgtcgcttcaccagctggaaacgtctatgaccagcagcgcctctgcttgagttttgctcatgcctgctggatttgttccacccactcggcccagcaggctgcactcagcttgcactactggmctggatcccacacctgccaagggtgagccaggcacaaagtggcgaggggtgtgtgagtgagcaatcatgaggtctgcccactgtgcacagccaggtacactggcttcagtggcagggaaggcagctacaggtgccagctccgtgcaaggctgtagctgtaccagatacaccacaagaggcttccactgcaggcacccacatccagacaaggggaatgcagtggcacctgaaagctcagagatgccaggaacttcagagccccatagaaggtattacagtgtgtcacagctctggcttaggaagccctgagatctgggttcccaggaaggctgcagctcttctttctctttgcccacagcatggcaaatggaggaaagcatgttttctcggggtcatgtttcagctagtttgtgctgcagctctttcagtcccaccgtcctgctccggcccatggctcctgagctgacctgaccccaccactgcaggtttcaagttcttgtcccacgtctgggaagaatgaagttatgcagacaactggagggtgagcaagacagagagaagctttattgagtgacagaacagctctcaggagactcaaagtggtaactcctttcagcaggcaggttgtaccaatgagtatctgagtctggctgagtctggggtttttatttgctcagaatggaggaagtaggtgctgactggtccatggycgggcctggaaaaagcaccattygactggctaaaaggcgtcaatgaagttctcactctaagttgcagactccaccttggattggcagcccagtccccagacttcaggctgttcctggcttgaaggtgggatttcactggggtcccaccacctcccacataggcacctgtctgcctcccaccaccatcaacatgctatctgtggtgcccaggctgtctatgctgaggggtgcctgcaggcccatgctgagcttccctcaatacccccggcctccctccctgagttcgtcagaacccaaagcttcagaggcggccaaggtggtgggggcagggggctggcatgacagcaccaccccaagtgtgtgcacacccagctcggtcgcagcagtgcccaggctcagctacagctttgctctgcactggagcaggtgctgggattggraagaggccagggagtaggagcaggcacttccaagcctgcaggggcagggggctttccaggtcctgagagcacagggatatccgagtcagaaccactgctgggcagctgcagctgcgcctagaagtgcaggctcccaccctaccaactcggtagggtccggggctcccactgggatcacctgttccctgcccctgccagcttcacagagcatgcagccccagatgtgcctccccmactgtggccagtgtctccacagtggccaatccggttgcgctacyaccgccatcaatagtataaacttacrtagccattactatgagccaggyactgttctaggcaccttacatatattaattcatttgatgctcacatcaactttctggagtagctactttttcagagatggacaactgtaacattaagaagttaagtaacttgctctgagttacaaggtaagtgggactgccaggatttggacgcttcatctctggatctgaagcatactttctttaccacyatgttacggtaatagattsatgttttacaaaagatatttctttattattcttcaacaagcatttattaagtgtctctgtgtgcaggtcacttttgctgttagtcttctggttgaattgtcttccacttcctctgctttgataacgttggcttccagacagcgtggtagaagagacagtgttgatgggtcttggagctagatgattgtgtaaggaatatttaaaaaaaaaaaaatgcaggtagtaggatgtcacaaccaacctttttaggaataaactagacaactgtatgaagaaattgtttattattttcatagccaagaaacaaaagatgttctcagccaaagagaagtatattgagtgtcttgtagatatttaacctaccttggaaacaacttgtcttgataataactctttatacagattacatttcttttttttttttttttaattagactttaagttctgggatacgtgtgcagaacgtgcagttttttgttacataggtataccagtgccatggtggtttgctgcacccatcaacctgtcacctacattaggtatttctccaaatgttattcctcygctaagccccctaccgccccgccgacaggccccgatgtgtgatgttcccctccctgtgtccatgtgttctcatcgttcaactcccacttatgagtgagaacacaaattacacagcttaactagtctgtctaagatagttaactgtccctcagatctgccccatcttaacttctaaatggaatttttactgtgattacttttgtaaatattagaaagtaataattatgcaattagaatgataccgggaagctttacatttcaccgtgtatgagtggtaacatttttgagaattgaaaatttttgagaagcgatttggcttcctgaaaactgtgtaggggcagcaatggtttaccctcttgtcagaagcttgtttatactgcagataagatcggtagatacattaaaactccacagtttccctgcctaacaggtgggaggtgggggcggaattaatttaagaaatattctttgctacatttgctagctcayaggcccaagtgttcttacagtacagataagagaggctatttctggaagccctgagtaccttgaggcctttcattacatatttgaaacatgcccaggatgaaaaggttgaaaaatatactcagatgctcatcttaatctctggtgtcctgtcaagcagggtagtttatcataatggttacctttctggtttttttacttcagtcttcgtatctaattggcagatgtagtgayaggataagagtcttcactttagaattagagcagtggtcccccacctttttggcactagggaccagtttcrtagaagacagtttttcaacagacggcatgggtcggggagatggttttgggatgattcaagcacgttacatttattatacactttatttatattattacattgtaatatataatgaaataattatataactcaccatcatgtagaatcagtgggagccctgagcttgtttttctgcatctaggtggtcccatctgtgggtgatgggagacagtgtcargtcattaggtactagattctcataaggaatacacagcctagatccttcrcatgtgcacttcacagtagggtttgcattcctgtgagaatctattgccaccgctgatgtgacagaagaggacattagcatgcaagatgtcatacagctggtatagaaaagggaaattagagcccgtaaagtgaaactcttactgtttccatggtataagtgcagaggtcaaggaagaggtgagccctgctagtttcttgctttgcctggtaacaacaatagtttcatgggataatgcgagtaatgcgaacaatggggagagcctgtaaatacacatgaagctttgctcactcacctgctgtgtggcctccttcctaacaggccacggactggtactgggagtgggggacccctggattagagggttcaggttttcttctctgggtgtgaccttgagcaaagcacttcacttttctgacccttaatattatcgcctttgaaatgaaggccttcaatggaagtgttcagcggggaaggagccttttcatttttcctaagtattcctttctttccccttccccccatatgcatgctgagaatcactgctgaagtgagtcatttttactgcaaggaaaggaaggtatagtggaaaagggaaaaaaatgttgagaaccacacagctcatttctggagtcctttcagctaattaaaggattgcagatattataattcagtattttaattctgattgattttatgcctaattgtccaagtgaatggatttctagtccagttctaatgcttgcttgcttctgtgttataaaaaaattgaactctagatggtttccaaagtctttataatcataacctatttctaacaacctatgtatatacatgttgaacatctgaaatttgaaaattttaaatctgaaaaacttctggtcccaagcatttcagataagagatacttaacctgtaaaaagtaagacttagttcttgttgattccgtggttggtctttatgtttacaagtaaatgcatattataaaaatgtagcttaaaaagaaaaggaagaatatacagtttttccctgtagtctttcttcctgcttcccagtttctctgcttatccctgctcactactttatacagttatgtctcttaaaattttaagtctgttggcatagttgtgtactcattgcaaggtatccacacattgggaaaattaaatatacacgcacgtaacacaaaaagaggcagggaagtcaaggagtgtcatgaacttactgaggaagtcttcctttctcagtgactcatagaaggctcgtttactctctaagcttgctggctactgctttccctgggaaaaggaagtattatgatgattaagtagtagttattttttcatttaaaatattctttttcttctatttcttactctctgctaagttgttgacagtgataacaaagggtacagagtaggtaacaatagtgactttaaaatgatatttggtgaaagatagccaaaatcatttttttcatctttacatctcaaatctgtaaagtgtgattgagggtaaatatcattcccatttattaagcattcactgacaaaaaagtacaaaataattatttttcttggaatatttcaggagaattagaaccagatgtttaaggactaggaagaagccttatgggggataaaattaacagtccatttctgcatggagtttagtgtatgaaatgggtcttttctatcagcgctattatatcctaacttcctaagatgttttggtagactttggcagtattggttttttaaaaaaaaattaatgaatacaaatacagggaatctcaggagtctatggaatactagtcttcatttgtcctcctctcagacactacagtactggcctgtttctgaacaccctctggggcatagggaatgccttttcactgtcagtatagagttctttttttcctttgatccagttaatgctgtttcttaatatgtcttcttcccccaaaattagaggcctatgtctatgtttttataacgtttatatttgcacagaatgttaccacttccaaaggagaacctagtacagcctttaggggatcagaaaggttgcagccaagttaagaactaggggtcaaatagaatggtcagacctacagaacatcttatgcaaaagccaggagacaagaaagagcccagctctcttgaaagctctgcaagtaattccagtatgattggagtaatagagttgaaggggagctttgggatggcaagggatgggaccagaagtgtaagcaggagccaattctttatgaaagactttgtatgctgcaaaggactttgggcttgatcgtgaagaacctagagaaagcagggaagcaaaagatcctacttaaaggagtttctggaaattgccctagctgcagtttggtaaacagattggagggaagcacaactggaggcagggaaaccatgcaagatgctggtgccataatctaaatgagagctgatgcggccaataatcagagtacagagataacaatgaagtaagattcaacaggatttgggggacttagagcagaggagaaaaaagaggcatggtcaaggatgactctcagatttatgaccagattagagatgctaacagtttggtaggtgattgtcaaaggtaggtaatgagatacccagaatgaaggtgaagagactaggtagctgagggtagaacccctaagtaggcagacattgaagaggacaaacaacatggagtagaaccctaaattagagggagactgtcactagagaaacaccttcattattgtgttgtatgccagaagctcaatatccctgcagctagcttccaaagggactttggacataggtgcaatatatagtttgaatgtgaacaatgtactttcccacaggaaggatgaattcagttacatggactctgcttataagcaaggattgctaaagcttttgaaaaatcccctcatcttcttctcactaccctattccctggtaatttcaggtcagttccctggacttacagggactgaacacctattcttcagacaagatactccctacctgatcaatcacacacatactttaagagaatttcactgggttgtaggattagcagacagcaattctcacttgctgtgtagtatgattagattttttaaacacacagtttaggtatccattaccattaaaagtttattttcagctagctaattccatgaatactaattttaaaaagcccattcccctttgacttcttctagttatgccatcaattataatcccttcaatcaagatttagacttaacaatatacatagcttatgttttttcagcatttgatatgttcaagcaaggttctaagcactttttttgtaataataccattaaacctcccaataacctcccaacttctttgattcatgatgtagaaatatagtgtgagctatgtatgtaattttaaatatcctagtagccacattaaaaagaagaaaaaagaaataggtgaattttattttaatacatttttagcccaccatttcaacctgtaattattattaaataattattaaatagataaatagtaattattaaaattactaatgagatattttactctcttttgaggtactattatctcattttacttaagaagggattgaggcacagaaaggtttagtgaaaagtggtggcaagtcagacacattctttctgtggagccagaatcccaacattgccgaggcatccttcctctttacctgtcccaaagtcagtgttaagtgaaaaagcagtagacacagccaaaaactcttggtcttagaatcacaggtgtggcacagcagattgaaagtattcagtatatctaaagcatcttatgatctttaagatgctaagtaaagacagcgagagcctattttcatgatttttattgcatgtaatatttcagctgtacataggggctcatccactgtaggctgcagcatgggaagctgaacacagtttgattctgttgcagaatttctcctgaagcagcaaccttgggcattcagccaaatcgtaatttgctgatatttttcattctaaaagatttacctcattgtgtttttattttgaaatttaactatgaaagctttaggttttttttcttatttaaaaaataaaatctgaaaataaaacagtaagggaattgatcattttcagaatgttgcaagtgggaaaacattacttaataacctaatacctgaaaatcctgttgttaaataaacattctattcattgataatttggatttcctaagagtggcagcagtggatatacatgatttctaaagttctgctatatctaaatatacatcataagattaggttacagaatcattatttttttttgatgtacacatctttgtagccttgtttttcagtcctgaaaccattcttataaatttacaaagcagtcaacctctttgagtgtatttttgatcatctgcagcgtgtaacagcaagcacaacagcaactgacatttggagggttactattttccaagttctgtgagtacagttctactaaaaatttacaagatttgtgctataatgatctcattttgcagtcaaggaaactaagacatagaaaaattacacatttacccaggtcctaacaggctttaaatgccaaggctaggattcagacaacttagtctgactccagagcctgtttatgttcttcatcattgctctgtactgcaagtgtcctctggcaccaaattttatttgttcagcttgagagataagtgatcattaaaagattaaaagatttctttctcacttcttgattcatgatacagaaatatgatgtgagccatgtatgtaattttaaatctcctgacagccagactaaaggaaaaaaataagcaaagcatattttcatacatctttacgccaatacattccaagtattaccatttcaacatgtagttgttcattaataattattaaattaataggtaaatagtaattattaaaattattaatgagctattttactttcttttgcrttaagtcttcaaacttaggtatatattttacacatacagcacatttcaatttgccctagccacatttcaagtgcttagtagccacatggctaccatattatacagcaaagttttggatgttgggttctcaactggtacatatccaaataggagtggggcagagggctgtgtagttcaagaaccactgctgtaagctttgggatttcaagtgatacatttctaaaatgttagaagagtccaggttgctaaaacccaatttttatatgagggaagtagtattagttttatatgcttttttcttttttttttgagagtctcactctgccacccaggctggagtgcagtggcgcagtcttggctcactgcaacctccacctcctgggttcaagcaattctcctgcctcagatagtatcccatcttctatctcctgggataggagtatttcagatactcctcccgagtagctgggattacaggcgcccaccaccacacctggcaaatttttgtattttttttagtaargatggggtttcaccaagttggccaggctggtctcaaactcctggcctcaaatgatctgcccgcctcagcctcccaaagtgctgtgattacaggctagttttatgtgcattttaaaataccagtctgttttcaagataatttgttgctactggctaagatttcttaaagtggcacactttgacagcataaaccaattcagagtgataatattagctgtgttattttagtccactgttaataactacatagacagctgactgacttcaaagaaccaataaaacttggagttctgactgagagccaaataaaacttggaatgggcaaaaattgagtttatgttatctgcagacattgcccttcttggtgagatactgctgtcttctgcttcagagtcccttcctcagccacactatttggtagtgactccttatttagcctayatcttgtaatttactgtggttaccattcttgggaggccattttaagatttcttaaagtgacccagagaaatcgtagcttggtatttactaaatgtgtttgtgtatgttatttcatagctgtatacgctcacctgtgtgtactttttaactgaatttattcatctaccttgaagtaatgttgtaactataaacctgtgattttctctacttttaagctcttccttctgataagcttatctattcatattgggtttaattatagctcagggcataaccatgtgtattattcatctgagtgagtgagcttgtctggcaacaagaggctgttgttgccaaagctttattgtcatctgggctgaatatactctgtctatgcctcattgccagcctcaggaaaaggaggtaatggggtgatgggggaggaatgctgtactctagtcccttacaccactgcttctcaatatattccaaccctttgcaataagctaggataactgtgattttatttacttcatccttttttaaacaagagaaatcaaacactagaaataaaatgtaactctccttcatttcctatctctacatctgtttcctcccatctccccattccacctcatcccttgttgttctcataaccactatcatgaatttaggtttatctttccagttaatttcttaaaagactttgacatagatatgtatccataaataatataaaatattcatacagtaggacctgtaaattcatacagtaggatcttttttttatttatacagtaggatcacattgtacatatgcagcaagttgcttttctcaccatattggtagacctttgacataatttttcttaatataagaatttggtacctatgtaataacgtatctaacacatggtaggtgagaaaacctagtaataaaacagaaagcacctgaatccactgcacacactgagaagtgaaacatacccagaaccattgaaactccagtgtgctgcttctccaacctctgctcctacccaggaaaccactcttctgaacttttttcttactggttttcttttcttacctcatatttatgtgtccctcagtagtatatgtccctgtttgcttgtttttaagctttgtagaaatagtatcctactgtatagattctttttagtcttaattttttattaaatgtatttttaagaytcattcatgttaatctgtatattgtcactgctatatagtattcctttgggtggatttacccatttttctgtcagtagccatttgtgttgtttccaattttgctattataaatagtgcttcaataaacattattctcaatgtcttctggtgrtacacacatgtaaaagtttctctgtagtgtatamctgggagtatagttgctatgttgtaaaataggtgtacagttgacccttgaacaactcagggtttagaggtaccagccccctgtgccatcaaaaattcatgtataatgtttgactttctccaaatttaactactaataataccctacttttgacaagaagccttactcataacataaacatttcaattaatacatattttgcatgttatatgtatatatgctgtattcttacaataaagtaagctagaaaaaagaaaatattaagaaagtcataaggaagagaaaatgcatttacagtattgtaccgtgtttattgttaccctgagtttacatcatctgtttacaaggtgaaatggcagctaaccacaactacagacctcaatctacagtgtatatcaagtaattcaactttttcttgtaatggcatgacttttctctgcttcttgggactacttccagaatcactagtggcccttcgtatggatcccatggtgttatttaaggtttacggtattgcacaaacacaatgaaaaatatgcgagaactgagagagagcactttttatggcaatacgcaatttgctggagagatgaactgctcatgcagagatgatttttgtcacgtggcattttaggcattttaagcagctattggcaatagctgagttcattgcaatagcaacaggaggtggctacaaaattattacagtagtacagtatgtattatagttacttttatgcagttatgatttaatactctatgtttgtgtttgcttacatttcttttaaaatgctcatggcatcatgtatggtttgtgggtataattttaactttgtaagagatcggtatatattttctggtagtaaataagaaaaactaatatctgtgtatattttgtgcactcatgacgttcctttttcttaatttttcaatatttctaggctagtgcgttgtcagcgagttttttcaaattgtcacaaatctcaaatttttctaatgtattttcttgaaatttagttcatctaagttgacccacgcaatgcagaccctgttgttcaggggtcaactgtatattcaacttaactagatgagcctatattctcatccgaaggaattactcatactcatcagcagtacataggagttctagtttttccacatcctcatcaacatgtggttttgtcaggcattgatttttgcatttgcattttgtaaaataatattactgaattttgattttcagtttcatttccccgattttgatgatattgagcatttttcatatgattattggccatttatgtttccctttttttggaaatgtctatgtcttttttaatagagtctttttttagttgattcttaggaacttgtgtattctcaacactagtatttggtcacttttatatgatccaaatatcttttctgtttgcagcttgccttgtcactctcttcagtcaaactctaatattttgacttttgcatttaaatatttaatccatctgcaacagcatttgtttatttactgagggtaaaaatccagtttctctgtttttcaaatataaaaacttttcctagtcccatcagttgacataaatcaggttttcatatatgtgtggaaaagtttgaggaatttctttgagcttccgaaaaaattttaaaatcaacttgtcgagttttggttttaaaaagcagttggactttttaattggaattatgatgaatcaatttrgagaaactgacatttgatatcaggtctccctacccataaacttggtatctccctccatttatttaactcttatgagtacttttcaataagttttatataattttctccataaagatcttacacatcttttatgactttattcatagcttccctacaagacctattgcaactcatttaaaaatacattttctaggggccaggtgtggtccagtgatgcatgcctgtaaacccagctacttgagaggctgagacccaagaatggcttgagcccattcttaggattagctaaatcctaatctcattttgcccttcttttcacctgagagaactaatacaattcactcgactcatgtgggccatattgttttcagcaaaattctctgaaactcagagacatgtgtactgctagtagccatgtggcttcttcacttgctttgttattaattcatcatcatccaacatactgacttaagaggcactaaggacaaggtacaacctgttcctcaagcaccttctagggagggtagaaagaagcattagttgcaaaacacagttataaaacaaaatgatacatcttatcctctacagacctcattggtcatgatgtatgggtcaggaagtcctttgggtggggagaaagaaaggaagattcagatgggatatgatatttgagcagagactttggatgatgaacattgaacctcctttgtgttctcagttgttagcaaagggatcagactagtcattccccagaggtccttctaactttgaaattttgtctctgacatcacaaataatttcatgctttcattaaacatttgtgtttctacctmtggcctgtagtccttggactcttgttccataggcgtagggttgtgaatggcaaaagaggatcttggtgttcttttatkaagtgataccaacatatytcacttctaggataatgacaatattggcaatatgaatcttaacatgagagttaactgattaactttttgtgtttttatggaattgctcaattggttatcataaatagattttgttaaattccagcctttrtgtaatttctaagcacatttcatttgtatgtcttatttcagtgctggacccaaaggagacaacatttatgaatggaggtcaactatattgggacccccaggatctgtctatgaaggaggggtgttctttcttgacattaccttttcaccagactatccgtttaaaccccctaaggtcagtatgaagttttcattgattkttagcaatatggattatatttctagatacatatacttrttcttaaatatgcattctagggatgcatgtctattctgttgtcacagacagcttcccaggattgatagtgtataaaatgaaacaatgtaaaaaattgtaggttattcctccaccccagctttttactgatttcattgttttttttctcctcctttttctcctcattatctcctttytttgttatatgttttaatgtaacattaaaacaccatgttttatgggtgaaaatgggggcataaggttgggccagggtgagtaccagagcccagaaaatcagacgtagcctggagccagagcccaagcaagctaagcgcaagaatcaggctaaaggcagaggaagccttgcctaggcaaggtttatagcaccagctatggaggtttgagttttggtgcctctagagttcagctgctcacatgtagcacacatggactagtatggaaagtatgacccacagagacttaaaagttgtgttaaaaaatttcgtaaagtatttataatagttcattaatgaaactaatcaatgaaaagtcatgtatgttcatgtctgatgtggaagagtgcagtgaaatcagaacatgaaagaatcctcacttatttaagccaaggttatatactttagaaagtcttcacattcttttctactgcctataagtcggatatttgactgttttaaatattgtgtcgtctccattagcatttgttctccactatagcaaagraaatgaccctgaggacactatgttttgactaccaagaaagaattctcgtctggccctgacttaacgtcacaatgcacagggatagaaaacttgtttgtattgtgggttggagtaaacaatataaaaaaacaagaataagactagacgttcaccatgactttctataattcccctccctcctcttttttgcccctgctcttcctttcttccttcctttccattgatgcttagatagtgttrccaaagcaaaaagtagtagctataattaccctcaatgaggaaaccaaggacagaggaactaagtaacttgtccagcattatgcatcaagcaaattgtggtgtaaggatttgaatctggaaagcctggctccaaagcccatacttcttcctacattacacaatacattttattcaagctgtcagggctggtggcactggtgaccaccaagagcttgcatttggtaggttttcaatgacaaagccatggtaaatctaatacttatcttctccctttactggatgggacccttataccttccttttctactttagaccagcccttatgtcacctggagtatctgttgtactatgagggatgtaaggacctttctttctcagcctctacagtaaaggatgcacagagtgaggaaggaggaggaaaactcagaccaggctattgtgctgcttgtaaatctgatgtgatctgttccttgagattagtagtttcagaaaatgtgtgggcttatcctagttctgaatgacagaaatgtgtagattaaacaaagctagaataagctggggggagagagtcaaatcgcattcttgactttctccactgagtcgtgcactccactgggcatcagctctgccaactcatttcttctccagaacactccagtaagactaggatgttcccctgtcacagaggaggaaacatagatgagacttagagaggttttccaagagtgtacaaccaggaatctactgaagtctgactccaggggccatgtactttccactgaattatacacacttgccttggagaagttgactggtaaaaatagggcgtgggaggaatgctttatctgtcctcacatgttttagggactatggtgtgggtaggggttggactttatccaggatggttggatgggacaaaaatagaagcaggagggtgtcagttaccgggaagtagatttcagttttctctgagggaaatctgacccacagtgggacagtcaacttgtgtgtagctctacctctgagacaccacacttccctttactaggagtgttcaagaaaaaactgagttactacctgtcaagaattttaccagaaaaaatggaatccctccacataatgaattggaccagacaatctctaaggagaaaaaaaaaagcaaactttggtacctataaccacaattcaaatgcacatttgataggtatctgtggaaagtatttaaaagcaaattatcaactcctaatatatcagttttagagatcagattctgtagatagatgtgttactcgagggagaaaaaacttggggtgtagtgaaggctattaagtaaaacaaatactcttattattaatagttttgatgtaacaactccatgccttcctagtgtcctgttactgtaaatagtacatgtttcaagttgtcttgggttttttttctctgctgcttggtatttttctctcttttgctcttttttttttttcacgttagccatgcattttgattcctgcaacatttcccaatactctgaagaatgaaccagggaagcagtgggtgtcagggggaattacttataagagcagatgcttataaatacatctgatgggctatctgatggttatttgtgtggatatacataccataaaattagtccgtagcatgattgggttcatgagataattttttccaaattatcataaatagaaccttttatgaggacttctaaacactgcagagctcaaatgtagcttttaaaggtcagaggaatgattcgagatgccccttcttgttgcaggaactttttcacagtagggcttgatcaggttgaacaccctatattccactgcccaattttttaaaatcagagatgagctattctagtaatttcttccagaatttgcctaaattctaataaggcgagcaaaacaattactacctgagtacataatgttaattaaacttagtattctagttttaaataggttgagtattagtacttttcaaatgctatatttcagtacaatttttagtacattgaatttcttatatgtttatgccttttacttaacctatagcacaattttactatttcaaagtaggtaaggcattttacatagtatcttttcttgtatgacattgtccattgcatttgatgtcaggtcttcagctgagtatttaaccaccaatgataatattatttctctgtgaaaatacctgtttaatagaactccacctaggaatactacattatggccaaaaagaaaagtgtaatgaactgctagtgtgtgtaaaagctttttacacctatttatttttcagtgtagacatatgttttaatgttttcattcagtatctttttaaggtagaagttgctttgttttttggggttttttttttgtcatttggttggttggtttttgtttttgtttttgtttttgttttttgagatagagttcgctcttttgcctaagctggagtgaagtggcacaatctcggcttactgcaacctccgccccctggattcaagcagttttcctgcctcagcctcccgagtagctgggattacaggcacctgccaccacactcggcctattttttgtatttttagtggagacagggtttcgccatgttggccaggctggtsttgaactcctgacctcaggtgatccacctgcttcagcctcccaaggtgctggattacaaccgtgagccaccacgcccggccagaagttcctttacattttgctggggattagcttttagattcatagataattagtttttaaatttatgggtaattactcctcagccaggtgcagttgctcacactggtaatcccagcactttgggaggctgagacaggtggatcatttgagatcaggagttcgagaccagcctggccaacatggcaaaatcccatctctactaaaaatacaaaaattatctgggcatggtgactcacacttgtaattccagcttctcaggaggctgaggcatgagaattacttgaacccaggagacgaggctgcagtgagctgagattgcaccactgcactccagcctgggggacggagcaagactctgtctctaaatgaataaataaataagtaaaattactcctcaaagtgctcaaaatctgtactttattttaaaagtttaatatgtaagtattttaatgttattcattttgcagcctacatatttgttacataattaaaaaacagttgcagataagcaaaagggaaaaaaatttgcctgtaatctcccccaaactgattattcatgccatttaggtatatctgttttaagacttttgtttccttcatttgtatcatatacatataaatatgtacacgtacatgcctgtacatatatatacataaacacacatacacctttttacaaaaattgggccatactccccatggcttcatgattactttttaatctaatgttatattttcatcccgtgccatatattatatatttccagtaaacatttaattgtgttacagttagaaagggtgcctagtattccgttgtataaatataccaaaatttaatcactttcatgtggctgaacaattaggttcttctcattgcttctgttataatcagtgatgtgatgaacattcatataattacacatttttatacttttatgattttctcaggttaaatttgttgctgtggaatttctgggtaaagagtttgcacgtgtttatagagtttttggtaacgattgacaaatcgtgctccagaaaaattctatcagtttacatcgtgaccatcaacatgacagtgtagaacttccctacactcccctcagcttttaggattttaagtcttttttactggcaatagatgaaaagtcgtatcttatggttgcattaatttacatttatttgactacctgtgaaatgtatgacagttttcatgtatactgttgtcctatctcattatttcttttcgtgaataatataaaaaacattttatcttaaaagtcttacatcaaataaaattaacaaggatgcttgaagaattcagaaactaatggaatatattatgttggggttttttcctaccaaaaacactttgaaaatattgtgacactctgtgtctaatgtttctgtttcagacattctttcttttttttttttttgagacagggtctcactctggggcccaggctggagtgcagtgacgtgatcatggcttactgcaacctccgcccagtctcaagcgatcctttcacgtcagcctcccaagaggctgggactacaggcacacaccaccacacctggctaatttttgtttttttttttgtttttttttttgtagagacagggttttgccatgttgctcaggctggtcttgaactccggggctcaagcagtctgcgcactttggcctcccaaagtgctggaattacaggcatgagccaccgccgccggcctgtgttagaaattataatgacttacatcctcactaaggactcatgttaggtaacaggtcaggtgtttgtcttttcagtagaaatgcataggggtaacgcatttttaatttagctttttctgtctccctgtgaatctgtacatgacataaaaaataagtgtaaatagatttgaaattaggtaggtgagagagtcactcatgtttgttttttattttcagtatttcaggcaacttatgcacaggttagacatgctgtgtccatgttcctgggaaacactgttttctctggtaatggcaagaagatagtatctgctggtgataaaatttgtgcctcaggtgttttataaaacaagacaaaaaattacacacatcagtaaagtgtctgtaagtgaaattaagaatgatattcaaaatcttttaaaatataatttgttctttcactacaaattttaccaagtacattttaaaatcctagagatcaattcagagcatatcagtttatgggtttgtttgttgttattttttataaagtctaactatgggttgcttactaatgtcagctaatgcggaaggccttcactgcttttgaaaagtgaaatagatggggtcttcaggttttcaaaatctttatttttctcattagattttaaccttaaattgacaggtcatggctactcataaataaggtagctaattagttacgataagaaacagtgatattcagcatctgaaagccagagagagatctgtaactgaagttcaacaatgagttccacaactgcacccttactctagattattattatgtacttgtttttattgttaatgctactactcaaagaagaaagttgaatgtgtttcccagaattttcagtaagagcagtgatttatgtgtgtaaacccaactacccattcatttactccagccttggttagagaacatgcagttgtcatggaataacatgaattggcttgtttttaacctgagttcgtgcattcatataaagcttggccatgggtcaagttctttcttasattttgaattgcctatttgacatctctagttgaacatccagtagtcatctcaaacttaacaaatccagaaccaaattattgattaccccattctacatcagccagaccagctcctctagtcttccccatatcaatgaatgtcaggtctttttttccagttgctaaaactaaaaaccttacattcattcttgactcctttcacacagctagccagacccagtcccactggctcaatcttgacaataaatctagaatccaaacatttctcaccatctttccctagaaactctttggcgcaaaccaccgtcaactgttctcctccctcagattattgtggaaatctcctatgtggtcttcctggttccacccttgtcccttcaacagtacaccccatatgctgaaagattccttttttatttttttggctggaatggagtggtgtgatctcagctcactgcaacctcagcctcccgggctcaagcaatcttcccaccccagcctcccaaatggctgggaccacaggcatttgccaccatgcccggctaattttgtatttttgatagaaatggggtttcgccatgttgcccaggctgatctcgaactcctgagctcaagcaatccgtccgcctcagcgtttcagaagtgctgggattacaggcatgagccaccacacccagcctaaagcttccttctatagtgtgtcagattatgtaaattatttgcttaaacccttcagtgattcccagctcctgaataaaagcctataaagccatatagaaccaccccgtccacagaacagttttcaaagtgccagccatcattttttactcaaatactcaaagcatgcttcttcacaagcctttccatttgttcttccttctgcctgcgtttgtatgccacccagaaattcacatgactcacttcatttctcccttgatgtctctgctcaaatgtcaccttttcagagaggttcttggatgacaaattccaacctccttaggttccctataaacttcctcaaacttcctcacaaccactagtatacttgattttttgctatagcacctctccctcttggtgttatatatttctttgtttatttattatgtttccctttccccaattagcatgtaagctcaatgaacacagaaactttgtctattttgatgtcactcctttaatctcatccatgtagaacaatacctggtgattcagtaggcagtcaataaaaatttgttgaattagttaaatgcatgtaactgtgccctaagcaaaatgtttattacccccacttcatggatcagaaaactgagctccatggaggttaagytgcgcacaggccacaaaggaagtaggtagcagaaccagaatctaaacccagttctaaactgagccttttatctccaattatagagaaggttgaggttgcttatatccctggaagaaggaatacttgttcctggattatacactctggtatgaattaattatatcacattattctccaacccaagtatttttgaggggagaggaaagacagtatgaggaggaaagagatggtttgaggaggaaagaatgttagaagagattttgtgtgcctttctgttttgccaggaatcctctttccgaagacactgggggcttttcttcaatatgtttctaattcacagactaacgtgttatatctacgttaaataataaatattgatttctggattttgccagctttaaagaagttacttcacatttcacagatcattttcacatttaactagtgtcagaatggccttgtatcctcagtgtcatgactgggctgtcataggtttgcttacatcacatgagtcagtttttctttttggtccgtgctccttttgataaacttttaataatggcatgctatccttaaatgttgtgtgaaatcccaaaatgaatgtgatgattaaaaattgatcaaaatggtgtcattgtctttgtgcttttaaaataatgcacattatatctgtgtgtccagccaccacctacaattaccaccagtttagtaattactaagaagtaggattgggttttgttttcagggcaaagaataccaactttattgtaagccaaattaaatatgcctataagctaataggaaatcagccttttggttgacaggaagtttaatttagccatattttgggaagatacgtttgttcctagctttctatagtctaatgcagtttgctaattttaaagaaggacctttagtttattattgtctcctgagatgcttattgctcaagccagcttaatttttcaggttggatcaactcaaccaactgtacgtttgcacaagccttgaagaggtggtggtgaatcagccactctgatatctactgacacacccctataagagccctgccataaaggtggaggtttcaaacaagtattttactgtgcttctccatgccctggagttcctatctctgtgaatgtgaccgcactctaaatggaagtttgtgttggttgatattactgtcagcataactgggaggggtagataggcctaaattccttcacgatggatgttcttccgcggagaagttatgtgaacaggggagactgaagtgagacattcagaagcttggaaaatgaggatcttctttgccttcagggctcagaaaaggttcaactcacttaccaaagaggggtgacttttctaaggaaagattcacagatgacacaagtgataccctcccctcacgtgagttttctgaagagagaagggtagggtaactcctccaggtacagtcttcagtatcccaaacatcaaagggtattgagtgatccactcactggtcccataaaacagtgaacactggaaactctgagagaaacactctaagcacataaaatttaaggacaataaartgatactggaagaaatattcttgtaaagaggaaaaccttctgtagtactgagccagatgaagcttcagttttggcattttcctaaccttayaggaaagggcttttatggaaccagatcaagacatggaacagacaccctgtgttgattgtctgtaaatttgaaaacaaattatatttcattgtccacttgagagatgggatggggaaataatattctacgtgtgatgaaaaaaagtataatattctccactttatttaaatatgttacttgcttagatagttatttgtgacgttattttgttcaagctgggatacagtaggcaggtctgagttcatttctgagactgcctgccaaatatcaatccctttatggcaagtgatcaaatttccttgattttttcttttttttaatatatatgtttttttattatacttgaagttctagggtacatgtgcacaacatgtaggtttgttacatatgtatacatgtgccatgttggcgtgctgcacccgttaactcgtcctttacattaggtatatctccgaatgctatccctcccccctccccccaccccacaacaggccccggtgtgtgatgttccccttcctgtgtccaaatgttctcattgttcagttcccacctatgagtgagaacatgcagtgtttggttttttgtccttgtgatagtttgctgagaatgatggtttccagcttcattcatgtccctacaaaggacatgaactcatcattttttatggccgcatagtattccatggtgtatatgtgccacattttcttaatccaatctatcattgttagacatttgggttggttcgtagtctttgctattgtgaatagtgccacaataaacatacgattttttcttttcattagagttggagcaggatctctccgtaaggtagcagcctcttagagatttgttcaaggagatctaaagaaaatgagacagagagaaatgaatgttcctagtttgcagctgtccaagagaagagtcagtacatgatcatggcttattgatgaattagagaagataggaccacctgtcctttcgcaggtgtggtgcaggtcttgtcctgccaaaaataaggagaaacaaagtcagacagtcaacaaaaattataaataaaatgcatctaggggactgggcatggtggctcacgcctgtaatcccagcactttgggaggccaaggtgggtggatcagttgaggttaggagtttgagcccagcttgaccaacatggtgaaaccctttgtctacaaaaaatacaaaaattagccaggcttggtggcacacgcccgtaatcccagctacttggaaggctgagacatgagaattgcttgaacccaggaggtggaggctgcagtaaattgaaatcatgccactgcactccagcctgggtgacagagcaagactgggtcaaaaaaaaaaataagataaaataaaatggatctaggatcagacaaagttattcatactgattcatataagcatacctattctaaaccatcaggtgaatttttcttatggtatcagtgtattagctgttaacagagacctgccaaaaattcttgtaggttggttgcttttttaaatacctgttttaaggctcatttataaagcagaggtttattgagcccctactactttccaggcccttgatatataaagatgagtaagatacagccctggaagcatggagacagaaagaacaattaggggctgacacaatagttcagcccagaaaagaattaaggctcagctgtgaagataaaaacaaggagaataatgtataaattctcttctcattccattattaagtaatcatgtatgtaccatgcagtggtctagatactgaacatagagaagtgagcaatggcatgccccatcttgcatagaatttacattcaaggtatgrtagaataggattttttcaactttgacccagctgacattttgagcaagataatactttgtagtaaagggctaccctttgtattgtagaatacatagcggcatgcctgatctctacccactaartgccaatagcaatctcccctgtccctcattgtgacaasaaaaatttctccagatgttgccaagtataccctgaaggaggggatcaccctgttgagaaccactgtgttagcactgacatccatatctactggtgactagtttgaaacatcaggaaggactctctggtttctgatctgaatgaccaggtagggatatgttgcctgtgaggaacttatgggacacctgagtgggaagtgcagaaatgttcagccaacagcttaatagatctggagttcaggtgagtcatatgagctagaggtactgatttgggagttagcagacacagatttgggtgttaaaaccctagatagaataaatgatctcacctagagaaatgggcaattttcaacccaaactgaatttttgaacctatgaatttccagaatgggttttccaaaagaaaagaatgatgactgaaaaaactaacaaagctgatattttctctttttcattaagttctcactgtttggggattggaaagttattttccatatagagtattattgctggaaagcttatataataatacctcataaaatatcatgcttttattacaaggaaaaaacctcatttgttgttaataaattatataaattawttttctcacaagtgcctaaatcaggcctaaaataagtcaaaataattacctgtagttgcagtggccttctgcagggcaatggactaaatgactttttttaagctcctcttgagcctttggtttcagttttaatcgaactaaaacttatataagtaatgtgattaggatcacatagctaataaggccagggtcagrattagaactcctggcctcctaatttccagtcctgcagcccctactcttcacacctgaaccaactgagctatgaagtgatcttggtaagtgcacagtaattcagttttttgcctacagcctttctttcctgcctgcctgcctttttttttttttttctatttattttattatttttgttttttgagacagtcttaccctgtcacccaggctggagtgcagtggcacgatctcagctcactgcagcctcaacctccagggctcaagtgattctcccacctcagcctcccaagtagccaggactacaggcatgtgccaccatgcctggcaaatttttttgatttctgaaagagattaggtctcactatgttgtcacgggctgatctcaaactcctgagctcaaccagtcctcctgagctcaaccagtcctcctgccttggcctcccaaagtgctagtattacgggcatgagccactgcacccaaccagccatactttaggtcactctttgtgttcttttctgtagtcccttttgcctctatttttgtggagaattaaggttaaataagattttttgtttgggcacttaccaagttgtatatctgtgtatagactgcgctcagtggctcatgcctgtaatcccagcactttaggaggccaagacggccagatcacctgaagtcaggagttcaagaccagcctgcctaacatggtgaaaccccatctctactaaaaatacaaaaattagccaggcgtggtggcgcacgcttgtaattccagctactcagtaggccaatgcacgagaattgcttgaacccaggaggcagaggttgcagtgagccaagattgtggcagagcaggaccttgaccatacatacatacatacatgcatacatacatacataaaaacttaaaatatctgtacatgtacagtatactatatatactgtgtatttatgtttcccccatacttggccactaatgcattttaaactctatctctgtggataaaacattacagtagtttgttcaacaaggaaataacatataaagcaatatgtttatttcaggttatttccagtttattttcttcatttcttttttcttttctctcttccagacatcactacttcttgtagtgatttscttttaaaaccaaactatttttctttttaaattagttttaaataggtaatatatatacacagtaaaaagttcaaacagcacaaaaggtatgcagtcctcctcattgcccagcattcccgttaccttcccaaagacatcttttattctgcatttactttttgcatttaccatcttgaagattatcccatatttgtatgtgtagatctttgttagaatcacataatattatattgaacaagtgtaccataagttttcctgtgaytgacatacagggattttttttaatcttttgccatcacaaataacgtttcactgagtatctttgtacatactgtctttgtggacttctgcaaatatatccgtgggataaattcctagaagtggaattactgggactaatgatgtatgcatgttcaattttaatagattctgcccagattgccctccaaagaagctatacaaagttatactcccaacttaggcacacctgcctcttttcctacatccttatcagtgctgtgtgacatcaaatatttgacctttatgaatctgatataaataaaagaatatttataattgctttctctcattataagtaaaataataccttttcatgtgtccagaatttggacttttttttattgaaagtaagtgtacactttttcttattgaaagagtgtgaagagtttcyatatagaaacctatggatgtagtattttcatctgtagaaagaggcttaacagtctctaagtttcctttcacatctttaactgtcagtgatttgtcactgccctgcttaaaactcttcagtggcttcccattgcacttagaataaaatccaaacttctttgtcttacaaggccctacgtgatctctctgcctgcctcatcacatgcaggccctcctaggcctcctttttgaccttatgatttgccagtrcatttgactggaacatgtttgatccagttcttcatgtggtcaataccttctcattgttcaggactgttcagagttagatcctgagaggtacattttctgaccaccttctataaacagtgccacactagttgttgctgtcacgtcaacctgatggtttctttctcacgttaccttctaagatccaaagaccttatgtgccttacagtacctggcagatatgattgatgaagcaaatgaatattcatttagcctgtgtatccttaacacttctgaaatcttttttgccctgttggtttgtagtactgaaatattgtgcagtgtgtatgtgttttcattctcattctcccatatctaatcatatctaattcttatacccagaaggcagggccttgcttttccctgaagatgcctgccataaaggcatccagtaaacccagtagaaagtaatattttattattattattattatttatttttgagatggtgtgtcggtgcctgactgcatgagaaatgacaaatggaaggaggctgagcagacaagtttgagaaagcacaaaaaagtggttaaagaacttcatcaagctgagacaaggagaaatgtcttaggagtctggtcaaatagaggggtttcattcaaacaaaaagccaaggggattaagaattgaggccacagtactgaattggtgaactccgagaatgtaataaaagtatactaatgaaaaataagacaatgattaagcaatagataaggagtaggaataaactgcagtttgtcttcagtttcagtattgggtcaaaatctgctcttaggtttaattttgatcttgtcctttggaagaccaaatagctgaatttctgattaatcatttccatcatctctgaacctggcatgatcaatgattgtatgatttgtactaaagaactgaccttcatgttttctgaagcttactctcaaatagttgtagggacaaaataaacttggggtgtgtgtgtgtgtgtgtgtgtgtgtgtgtgtgtacatatatatakagagagagatacatacatatgtatagagagagagataaagcagatttagcaagctgttaacagttggtgagtctgtttactataggtttgaatttttttaataagttgaaaaacaatgaaaagcaaagtgaaataggagatatttcctcctgcaggtgtgcacacacatgtaaatacctaacatttggagcactgttgttgaacaaacagagtggcagggaaggctttctcaaggaagtattatttagctggtccatgatggatgatagaatttcaataggaaggagagagaagataggtttatcaagctacagaatgacaatgtttttaaatgtgaaaaatacaagccctccctcctccttggacatggataccatctcctcctggcaattcgattagtatgggtgtataaccagcatatactccctgtaaaaattagacagacacttgaaattttaatacgttctcattaattaagaacatataaaagtggtataaaaatttgaagggcaaggtgcagtggctaacgcctataatcccagcactttgagaggctgaggtgggaggatcgcttgaggccagaagttcacgacaagcctggacaacatagtgagatcgcatctctacaaaaagaaaaaaaaaaaaaagaaaagaaaaaacgagccaggcgtggtagctcacacctgtagtctcagctactcaggtggctaaggcagagcttgagcccaggagttggagatagcagtgagctataatgatgccactatactccagcctgggcaacagagggagaccctgtctctgaaaaacaaaacaaaaattaaaaaggagmaaccagattaatgtttcttaagagaacatttcttacatcattccactccaaaaaagatgttgaagtacatgtgcatgctttgaaagctaacctgcaggtggaaattcagaaacagttgtatcttggataccagttacactgttctattactgtatttctagatacatagtttaagaacaacttttttccctcaaaagattgtgtgaacaacaaatacaagcaaaaatattagggggagaaagaatatatatcagagcaatagcattgtttgttataaaaatattcaaagcaccttcttagagcagtgcataaaacttgagtttgtgagattacttcagtgaaactgcattataactgtgaaccaaatctgcaaaacagatggttgaaagagataatgtttttaccttactcagttggtattagagaagaaaagcctaataacactatggtaacagactctgataccagcagtatctataacaaaaaaaatcttgttcctccactaggctcagtataaagtaagcagatgtatattatagcagtcaacagtgtttagaaaatactattcctgcagtataatatcaaagtgaagacaaaattcttaaatatttttaatagtgaaagtgtaatagttagaaatttggatgaaaaaatttattcttgtatcctctattcttaacctttttaatagatttatttttatgaccaataaaggatgttacttccaaccaggctaaaagtattttactatgtgactgtataaactaatgatacaggtttttagtacatacctgagaaatgagtcttattaatttaaagttttacaacatctagctaaagccatccatctaattgtgggacctctagatatgtgttctttaacaccttagaacatatcagtttcatgatgaacatgaccactttactatgatgatatgttagtttttacttcaaacaaaactatttatttctgtcctttaataccactagataattttgactaaaataggaggaaataaatgaaacactgaccaatacaggcctttgaagaaagtgcattcttctaatattgtcagaacaaaagtccatgaatcttcttttaaaggaaaaaaagcatagttagtcttttctaccgagacatcccagctttttaaattatttgaactgtttatttgaagtagacacaatgtagtgatatgtgccatgcttctggaatttctatgagttttattttctaatatgaagaattaatgaaatatttaaaatctcaactctgcaattaatatttaagacttataatctctgtcgactaaaatactaatcacaagactttttaaattgccttaaatcaaaatttgaatgacaaagcacatttccctacataagctttacacatctctccattgacacctcccatctcagactcccaaaaagaaggcactgtaaacctaactgttgaaacatcagaagctctcgatcaattgtcatttttaattatggtatgtgtggcctcctttcaaatgtaaatattctgtgtttttccagttaatttgtttattgaacaaatacatgtcaatatcctctttcctagaggggataaaaatcagtatcagagataatccctgtccttatataaatttgttccctttgtaaataaacatttttgctagcctgtctacaaaaaatttatttctgaaatctttatttagctgtacatacaactatcagttttgtaaaatgaagttggcactatttatttaaaaagccacatgtggtgcagttgtttgcttctaaaaggtggtattgttataccacagcagacaattttctactagatagaaaatttcaaagataaatgttgcaaattatatggaaaggaaaacagcggcctagagtgtttatttaagatagtacttcagatttcttttagggacaggagattcaggaagcaggaataaaacattagaaaatgggaattttttttttcacacaattctgagtcattcttattccccctactccccactcttccttttttctttttccttgtttctatcagatacatttctacacagctttaaggaaaattaacccattttttttagggcagtagtcttacagagaatattggaggggaaaagataaacccaaaagaacaggctttggaagccgtggaatgtgaatgaagcaagatactctagaaggtggaagtagagactgaagaaatcatgtcagaaatcatagagtggtagcagagattagatatggacaagtggggaatagagaagaacagaagagagagattgcctgggataaaagaaaattaggcatggaaatttaagtggaaaacaaacccaggtagttaccattagatacaaataaaatttaagatattcctcataatactacatattccttcagtaagactaaaaagtaattcttgaatgcttgccacgaaggcagaaagaggtatgtttgtgatagtcctggagttgttgaaatgagctgtgagctagtttatgtttacagtgaggaaggaaacttagatccatccttataaggatgccttgacctgaagagtcagaaggcttgccttaggctcttctcatatatttgctgccttccttttcccctctccgatattctccacagtgggttccaggaagtggtgcaggcttgatgggaactggttttcagtaagttctggctgctgtgtgcctgcagtgccttgtccctttttccctctgtccctgcctcagattgtggattgtgttgcccatgttttctccatctccccctcccttatttctgtttcacatatattcatttctttcttggtttggtcagctgttaagacaatattcaaagaaaatggtattaatcatataaaagccattttgtgaatttaggaataagttagtgtcatctaccacaaagcatttgttccacaaaaggctaatttgagaacgaacatcatataacaatcctgttccaaatccctaaaacacctctttcatcatggcattctcctaaactgcaggatgaaagaccagctcctcagtttgtcattcaacatctactccttcactccttccctaagactccaatcttattttctaaccatttttaagtaaaccaatatttgtatgtcaggttggttgcaagggggtcatatatcaagcaagaattagcacattctcaaatagaaataactagcttagaaaattaagtgcacttctactttaccaaggtttttttttttgctattttattcctttataacaaatgcttatacattatcatttttctattttacaatctaattcaaatcatcacatagtattagtcatgcctgttataaaaccaactaaaactttcaaatatttaataaaagtacccttttttatttttcaagtatgcttcctgattagctgttactttcagtgtacagtattatgagtatcaggttagttaactacatctattctgcatagatgtttaaacaatattcactagaatattctgtgtgctgagatttaagttattcaaagattatacatgttaagtgagagttttcaagtcatgttgaaacakttgtttacttttttaactgacttgggtttttttgcctttagtaatctcacaatagtaatagtgaatatatatatgtgtgagggttttttttgttttgtttttgagacagggtctcgctctattgcccatactggagtgcagtggcacagtcatggttcactgcagcctcaaccttgtgggctcaagtgatcttccctcctcaaccttctgactggctagggctacagacacatgccaccatgcccagctaattttttttttttcattattttgtagagacggagttttaccatgttgcccacgcaggtctcttaactcccaggctgagcctgagccaccacacccagccatgaatatcattaaacatttcttctcttcgctattcactttacatgcttgatcattttgtcagaacttgatctgagaaacctgttgaatccctgtgtcattagctttgctctgtaaagtcaaactgttgagatctggaatttacataattttctttattatttttttctgtcattttctttaattaaaaaaaaaactttgagggtgtggggttttcatttgtctttgattattttgtattttccttataagctttttgcttagtattggaattgactttactgtgaggatttgaattcctctcaacctatgtctgtttcttagtaataatagtacccaccttacaggatgagtgtgaagattatgtaataaatgcaagtcacctaggacagtgcgtggcacataaacatggcattattggtagctattttaattattactattatttttggttacaacttactgtttatacatgtggtattttttaactttatggtaagaacataggggaaaaatatsattaccctcaagtatgcatacaaagtttggaaatttttatagtatttgtgaatactctgctactttcaaagaatgtctcttttgtgtgttgtacacatagcattcaaccaaaagagtgggaatttggccaactctataatagctgtaaatttacttatcattaacagaatcagtcattgttttactatatttttattagttttagagacacagagtctctgtcattcaggctagagtatatggtgtaatcatagctcactacagcctcatattcctgggcacaagctgccctcctacctcagcctcccaagtagctagtaatacaggcacacacaaccatgcctggatagttttttagttctttgtagggacagggtcttgctgtgttgcccaggctggtctcagatttctggcctcaagtgatccctgctcctcagcctcccaaagtgttgggattacaggtgttagccaccaagcccagctcatgtttttttttatatcatgtttaaatatagtttacttctacacttttgtaggctgtatgaaaagctaaatcatcacttctagctagtttgacaaatactttgtattgtgttgtatatgaactggattattgatctcttaaaataaataactgacccttcatatatctataaacataaaatgtattactcctttcctgaaggatggagtaatcctgtacattattttcattttacatttatcaaatctgtaaatatgctgcgtcttacagaattgccttggggagtgtgagacctataaaaaatgtaragaaaagaaacgaaaaggaggacattctccttctgtttgtgtttatgtcactgtctttagttaaacagcaagtgtgatatggtcagtcatttattacatgctttacatggaatccattaactatctcagctgttgtgcttcctaattaattgttgttatgtatgagacacttttgcagttctaaagccagaaatgaatcatcttgtctaagagatgttggtcctttggacatctgttaaattatcttctgtggacagtactaattgataaataagtgctgttggctcaacatagccccacataatggttgttaagtttgttattcaagagcaattgttctagtacctgactgggggagactgatgcctctaggacaagctcatccaatccgggcccaggatggctttgaatgcggccaacacaaattggtaaacctccttaaaacatgataaggttttgtttgtttgtttgtttgttttagctcatgagctatcataagtatattttatatgtagctcaagacgattcttcttcttccaatgtagcccaggaaagacaaaagattggacacccttgctccagaaggaagattaaaccaagaaagctttgggttctggttttgatggatccccgtgtaccccccacccccccagcactaattgagcacctactatgtatgtgcttaatgaattaaagcagtgtgaatgtttaaatgattatttgtgtacctgtttaagtttagataccaggttatctttatttccaccacagttgtttggtggaacagccgtttttaaatccgtatgtgattatgttattggataacttgtcctaaggcacaaaaactcatttgtagaaaactcatataaccagctaattttttttttttttttttttgaggcagagtctcgctctgttgcccaggctggagtgcagtggcacgatctcagctcactgcaagctccgcctcccgggttcgcgccgttctcctgcctcagcctccggagtagctgggactacaggcgcccgccaccacgcccggctaattttgtgcatttttagtagagamagggtttcaccatgttagccaggatggtctcgatatcctgacctcaggtgatctgcccgcctcggccttccaaagtgctgggattacaggcgtgagccaccgcgcctggccataaccagcttattttttaaattccttgttttaaatttctgttttgcttttttgagtaaattttttaaagacttgttaaaatctaagccttcaaatagtgagtttgtactcttagagttttgtttaatttctgaacccctccacttttttttaacccattgagaaggaaacctctatatgcatgccaaacaagcattgattgagctggtttcaggcaactatgtctttaccagatagtatctccttcaaaagaaagtatttgagatgtcatctgtaggagacttctatgaagatttgaatctaaatcagctcttcttttcctaagggattattttattttattgccttatgttttggcatatatggtacagtctagtctcaaactagtgttacctgaggcccatgaagatgcaaatgcaaaacattccacagtccaaagcacatgggacttctatagaaagaaaaaaaaatgcccactgagaatgaactcacactcaaagatttctgtctgtaccatgatacaatctaccattaaggagaatcttctggaataccatttctgaaacttaaaaaaacagaacaagtcaagagacaaaataattgtgtaaagataaaaaaatgaaatatgaaatataatgaaagaagtaactaatttaaaaaaaacacaaatttagaaaagaaccagtgamctttattcattataggtatgttccagaaacattctatataaactgaatttttataaattgcaaaagaaggaatctgtttgccccttatcaagtcataccaagcatcctgcgctgtaggagttgagagtaatttgctgtattgtaggaaagagcactgagaattgaataagatgctcccaatcttctaagagatttgcttcccgtgatggggaaaattttctagttgcatgtttttctacatttatacataaaaggaaactgagaaagacttttttcaatttaaatgtctgtggcataaaggtcttttgttttaaatcatttgaattgtacttgaaagctaaaagatagtagtcttatcatgtagcatgctctagcatgtagttagtattcacagctggataggtgtcatctttatgcattatggttttcaggtgatgtttaatttcagttccttcactgccagttattcaagggccagmtaatattcctatggggtggggggctgggggaaggtggtgttctgttttgctaatgtgtatttcttagatatacatatttttcaggatttattccctcactataatgaggttttccatttttattttgtcactaataaaaaattaattttagggtgtatgttagttattggtgcagtgctctcaaattggttttaagaaaagagcacttgaaatctcaaagaggggattttttttttttatgtrtactaacaacctgtttaaataaactgtagtttcatagtgagcctaatgatgttaaccataccattttagagctttgttacatgatttactgattcatggcatgggggcttcaaatatttgtggggttggggggttctccgtggaaaagtatttttaaaaagaatgttctcactgattgcagattttctcagtaaaagcaaggcaccatttatgtccttatcaaaattttttgaaaaattgaaaaacattatcattgaaaaattattttaaattgttattttgaatgttattatcagaattagtttttcatcttggaggtgcttacttttaaacatctttctaaattatgtttagaatcagtttgtcagaaatactgtattaaaattttttttatatttatgcctttcatgatctctgtcctcttacaaaattactttttatttatatatggagtcttgcctataccttaaagtgatgcattctcagttaatcttataactagtaactaggggatgtaagagaagggaagaagaactaatactcattggattcctgctgagtgccaggcaggctattagaaccatttgtgtacttcagtcttcacagctactgtgggtatagctgttattttcctcattttacagatgaagaaactgaatctcaaagatgttaagtaattcatccaaaaagagaattccagcccaagtccagctaactcccaaacccatatattctttccacartacaactcatggatcatggaactagaataagccttagaaataatctaagcctcttgttttgttaggaaagagaggctcagagttgcaaagttagttatccaagaatgctactgtgttcttttatgctttagtcaacataaagaatgttaactctttctagaattatttttaaggagagatgattctgtgaagtacagaaatagcacagcttcatttttaagtaccttttaagagaaagtaatgagacagctgggagatacagatacacacagacacacagacacacacacacacacacacacacacacgtgtgcactatattagtttcctgttgctactgttacagacttagtggcttgaaacagtatgaatttattgtcttatagtcttatagttccgtgggtcagaagactcaaatcaaggtattagcatggctgagttcattcttgaggctttaggggaaaaatccatttccttgcctttttcagcttctagaggccaactacattccttggctcatggctccttcctcacatcacttatcacatcccctactactgaccctgatcctcgtgcctctctcttaaagtacccttgaaattatattgggcccacctaaataatccaggataatcacccccatctcaagattctccgcctaatcacaaggctgtttttatcatgtgaggtaacattcacaggttccaggaattaggatgtggacatctttggggcaagagggcattattccatctactgcacatgtgtacccacacatgcaggtgttgggtgtgtgtttatcacacataaattaaaacctttgttatccagggccatctgggaattagccattctaaataaatgttttctatatcgctatatccaagtcgtatttttaaaatttcctttttatggaaaatgttccaaaaggtgctgtcctccctgcctttgaaaactgttattctcaatataattttacctatcattgagaaaaggtggctaccattgtaaacatcagttattgagctatgcttcaaatacagctataaatgccaatgtaggcgtaactagtttgatacacagaactcagcgggtattaacccttgcaatggaagtgcagtttgctttatggtcattttttatcatttgcttgtttgtcaggaacatgacatgaaggatgtatagctgcccagccccctgatcaaaataatgtgatgggctttctggaaaattgagtcagagatcggagtagtcttgtaggttaagggtgggaagacttcttttctcagcctctaaacttctccttctggcagttgcaaattctttgctatttgtcactattcaaaacattatttcctatttctgaatcactaatatctaaggaccgcaaacaattccttatcagtttgcaagtattctttctcattttccctagtttgttgataaggtctagaaaagaatgctggctgcttcaagggcttttattagcgagtttttaccttgattgtagaacatgtttgctgatgtaaccagaccactcatttcttaggttctctttagcatttaaataggaagtagcagcaatacaaatgtttatgttggagtgcccggcacatattgaatgcttactgaatttattatttctattattagtttagcctatatgaagccccttgtgaaataatattataacctgtaggaaaatttagtaaaggaacatgggacagaaaaatgttaaagagatcttctccttcctcaggatattctctagtcttccagcttttactcttaagttatggttctaaaacgctcttttacctaaaaaacaataagaggttataacccctcagagaccacgagcctgtggtgtgttagcatttgttcaacaaacagtgggctctttmtgtatgccaggcagtgctttggacatcagttgaaagacaatactttcatgagtaattcatgatttcatgaggaggtcctactgcaagtatagtattgaagtaggaatatgatggcaggacccccaaagaggagattgcttacatttcaatagataaacacataacacttcttaaaacttagggatcaagattttgtttcctgcttcaaaaggtggtagttgtgggagtctctgacattagaacatgttggaacagtcagtgtgtctgtttaattcagtgtggtttaattcatgaacacctgtcagaatagaagttgacaaacatcatcatcaaagtagatccttttgttatcattataaaatattcaagtttaaaactctgtccagaaattcacaggattctttgcaaactcaaattttattatttttcatccagttatactttggttttaacgaaatgtctccatttaaaacaccataaagtcaacaaaatttattaaaatttttaataaaaactgagcaaaagatgtgacaaactgtagaggatatccagataacacataaacaaatgaaaaagtgttcaacattattagcatttaaggaaatgtaaattaaaaccacactgaggtatcattacaccttatcaaaatggctataatgaaacatagtgataacaccaaatgctagcaaggatgcagagaaactagatcacattgctagtgagaatataaaatggtacaaccactctgggaaggagtatggcaggttattataaaactaaatatgagcttaacatatgacccaccaattacactcttgggcatttatctgagagatataaaaacttatgttcacacaaaacacatacacagatgttcatagcagctttatttgtaatagcttgaaaatggaaacaaccctgcgatattgtgatttttaataagaaatatatactatttggtcctgatttttggcacaaagctactaaaagccttgcgatctcagaaatgttaagtgtcttctgatgctaatgaggtgactggtggctggggtctcctggaaggcctcaggatggaagctggttgccatcatgtcacaatcatgtgattagagggttggaactttcagcccctttcccctataaccctcagggagaggagagcatctgaaatttgagttgatcactaatgaccaatgatttaaatcaatcatgcctacataatgaagcctccataaaacccctaaaagcaaggttcagagaggttctgggttgctgaactcatggaggttgttgtaccccaagagggcatggcaactctataccacccccaccaccccaccccaccccttatggctcgtaccttaccttatgcttatcttcttaactgttcagctgtatcctttgtaatatattttataataaaccagtaaaggtaagtaaaacgcatttatggattgtgtgaactgctttagcaaatgattgaacctgaggagggggttgtgggaacccccagtttataacagtcagaacttggattggcatctgaagtgagaagcagtcttgtgggactgagacctaaacctgtaggttctgactctaaatccaggtggatagtatcagaattgaactgtgggacacccagctagcatcagaaaattagttgtcaggagaaactcctcaccccacatttggtcacagaagtcttctgtgttgagagagtaggaaaaacattttgattcttccaatctcatagaaacccagatgcccttcagtgggtaaatgggtaaacaaattggtacatctattactgtttggttcttagtcttatttggagaaagaattctgccaagctactggtttagccagagaaagagaattcattgaaggaaaatacagagtagggagtttatctagagagacagtacactctgaaaagatgaggcagggcgagctgctgaaagagagtgagccagcagcaccccgagagtggtgggtttttatgatttcagattttttcttgaagttcctgcctctttcttaagtctccgcctttttactttgtttagttttctgcatctgccttaagtccctgccttttccctcacctagttcccgccccaaggttgtgggaccctcccttactattggtgtgcacgcgtgaacccgatgttggacacaaattgcttctgcgtatctcttaggaattttctcctttgccctcttccctttagcatgcatctagctacattctggcaggttaactggcagagtgagcaatcactggggtcttaagggggattcctttctgcctaggtatttcccctcctgtctgttcatatctagcacgcctgtttggggtgatccctggggcatgagattttccagactccttttctcagggcagcccttctcctcctcatgtctgtttatctgcctattctaccacatctatgccgtggaatactactcatcagtaagaaaggaacaaattattgacacgtgcaacagcttggatggatcttaagggaattgtgcagagtgaaaagaaccaatttcaattggttacctactatacgattccatttatatagcgttcttgaaatgacaaagttgtggagatgaggacagagttgtagttgccaggaattgaagtaaagggagaaggcaactatgkctatcgcagggtaccatgaagaatgtttgtgatagagttgtttgtgtgttgactggtggtattcacacaaatctatacatgtgataaaattacatagaactaaatatacttaatatgcatgagtgcacataaaaatgaaactggaaaaggtcagtggactgtattaatgtcagtttcctgcagtatactgtagttatacaggatgttttcattggggaaaattgagtgaaaaatacatgggatctctttatttcttacaactgtacatgaatctacaattatcccagaattataaatttttaacgaaagaacagaggcattgatgctgagagacaaaccgtaggcttttggatcagcacaattgtgttcaaattctggcttccacttaccacttgtgggatcttgagccagttctttaacctccctttgccttagtttcatcatttttcaagtggttgccaataatattattttccctattgagttgttttgagggttaattatcaatattatgtaagccactcattggttaaattgggatcgtaaaaatattttatcttttcatttagcacttaaagggataggcactctgccttctccagagaaattttaatatcacgagatagtctctgtttcattaacttaggctagtgtctttatttcttctttcatggagtttactctgttgttcttttactaccttcctgagttggacacttaactcattaaatatctgtcttccttcctaatgtatgtgtttgaaactgtagatttctcttttacaactgttttagctgagtcacaaaattttgatattggcaacccaatattttcattgtcattcagcaataatagtaactgatttttttctttgatccaagaattatttgaaaatgagtttttcagtttccaaacatatgatagggggatcttttatatgtagattctgactttacattatggtcttaataatgtcaattctttgaaatatgtaaagcttcttttgtggcttagcatgggatcagtttttacaaatgtttcttaaatgttccttaatcattaagtgtaggattgtgtcttcattcactcccttgattttgtttatccaattgttcagatctccaatatccttactaatctttagtctggttgacctatcagttactgtggtgaaaatgtccstctttgattatagctatgtcattttctccttataattttgcacatttttactttgtatacttttggctatattgttagatacagcacattcagaattgttactgttttcttgatgagttgtttattttatcagtaacgttctttgtttctaacaatgctttttcccttaaacatattttgatctgataatatagtcatttaagctgtttttgttagctagtgtttacacagtatatgtatctaggatttagaattctcaggaaaaacatttctcttctcattctagagcccacgctttctttggtaagtttctttgctatctctgtcataaggcatatcttttcaagtccatgcatttactgaaagactagccattcgagtttcctaattgatataagggcgctcaattctaaattcttgcaacatacaggcctaagatttcatcttctttttccatgagggcatcaaaacccaaacctccactttattaagactgagtaccatcttttactcccttccctcttcccaaaaccccacccatggcaggtgcagtctcagcttgttgcgcttactataatttttggtttttaattctgggctctgggaattccccttacagattttgctatgcattttaaagaatgttggttatattttcttcaacatttctaggcatttaagatgtgtatgtaggtgtcatggattatctggtctggcatgatgctagaagggcagttctcattagaagtactaatttaacctgagaatgrtgtctcttgttcgacaaccacataagtctctagatttgccctttctgagacttcgcatcatgtaaattacataaatctggtgtttgactggatgctggatgccctggtggagtggcagcacctgcagagatctgcatgtgtgtttttcttggttcagagctattttgaacatagrgtaccaaaagactgtctttagaaccctgagatttttgtatatttcaacttaaaatttaagaacatttatgaacataatattaatcaataatattcacatcttattgccgtttacataacacttttattaaacagttttagtagttataaaactgatttgcacttaattattttcgtagttataaaactgatttgcacttaattattttcagttgaagtgttttacaaatgatatggtcatgtttcacaattacatgtaagcagcatacagtggtgatctagctatcacagggcaaaggtaggatgcactaatattacgttttaaaaataaaatttaagaaggaaaaggtttctaaattacagctaattgtaactagtaatataactaaaatagtaaattgtaactactataattatactaatatagttctatgaactgggcatgttatttatataaatgccttagtttatgttttaaaactgtgttataggccgggtatgttggcttacacctgtaatcctagcactttgggaggccaaggcaggcggatgacttgaggtcaggagttcaagaccagcctggccaacatggcaaaaccctgtctctactaaaaatacaaaaattagctgggtgtggtggcgggcacctctaatcccagctacttgggaggctgaggcaggacaaycgcttgaacccgggaggtggaggttgcagtgagcaaagatcacgccactgcactccagcctgggcaacagagcgaaactctatctcaaaaaaaaaaaaaaagaaaaaaaaactgttatagaataatatttattttctttgtattagtactctcatgctttttggtgtttgaatattataaatgtacaaaatccttaaaataactggaatctaacaaaagttttctttgaaattttttagaagtcagagtcagtttctccccatgaacattcctgtagttgtatcaaaagtaaattcagtccctaaaacatttgttaaataacaggactctttataagaagcagaatgtcatggttttgctgttgatgtttatttctctgtgcccaaaatgacaaattctaaaatgatgatctctgttgattaatctcatgtgcccaagaaaaaaatcaagtgtatgttaaccaatagcctgggctattttgtctgataaaataggcaattttattagacaaaaattgtctatagatactgttaataaacactttgtctaacaaaatataactttacattttcttgtaggttaccttccgaacaagaatctatcactgtaatattaacagccaaggtgtgatctgtctggacatcttaaaggacaactggagtccggctttaactatttctaaagttctcctctccatctgctcacttcttacagattgcaaccctggtaagagactttaaatctagtatgaattggagcttgtcaagatttaaatgtcagacccttagtaacttgtttactactgctactaccactaccaccactgcttctactactattattgttaaattttcatagtatgtaactattttctttttaaattggktcttctcattagtgtttttaagacctatcatttgccaaaaaggaaaaagtatagygtggtaaaaaaaataatgaaaaatcattttagatgggaaagtrcgtttaaagaatgaattaagttatcctgccaaataataataaaaattcaagttgaatagcttaatctttaattagatgcctactagaagatgttaatttgaggaatgtgggctattaaaatctgataacaaccaggcagcaccatgcagacgtgacctttttggcatcctagtaactgtgcatcctgacaagctattataacggtcctgaatggtctgttctaggaaataccccaaaagtaaacaaggaaatacacctcccaagaaaacgaaaaagtctatagccaggcctttatggcttgctggtgtgcttaccactgaaaattcttaattcctgggccatgtctttacaaattgggtttattttagaaaatacaaaaatccaaagatagctatagggttttcattgatgttctcagtgggagaattattttatgagtaattaatagcttaaatattgcatgagattccctcttctacaatcatgagtaaactctgttcactggatacatgaaattttacacaaatggaaatgacgagtatcagtggggttgcttaggatcctggctgttttataaaacatcaagaaataacagtctttctacttttatatttctttatttttcagcagtaaaatcttttttaaagtagcaaattagtattttttttttttttttttttttgaaactgagtctcactgtgtcacccaggctggagtgcagtggcacgatcttggctcccgcaacctccgcctcctggattcaagcgattctcctatcttagccccccaagtagctgggattacagccgtgtgccgccaagcccagcttatttttgtacttttagtagagacggggtttcaccgtgttggccagccaggtctcgaactcctgaccttgtgatccgcccgctttggccccccaaagtgctgggattacaggcatgagccactgtacccagcctgcccaaaaaataaaattgtgcaggatcattataaaatattttttgaattaattcatactttactacagacagtaaagtccaataatgttatactaatttaaagttaattttgttctttcagtcctgttgttcccattttaatcccatttgtctgtgactgtgtataaccttgtataacctcatttggaggtaatgttgcaagaaggctttttttttttttttttttttgaggtgatttcgaagcctggcctgctttgcctccaagtcagctgaaatggaatctgttaccctgaataagcctgtatatgacagcctgttctctctacagatattcctgcttaaaggaatagattcattccaccaaagccttctctcagcaatcaaaaagacttctgttcagtgaactagttttttttttttgctccgtttcagaaaattacaaatgcattctgcaaaaacttaaaaatcactcctaactaaagcagaaccacataagtaaaagaaatagattttgaaataatgctattgatagtaagaacaagcctaaaaataatgttccataaaaccaaagacagcctgcctcatatgagactagaagagaatttgtaaaatacatgctaacatttagtttatcacactttttaacacataaaaataaagtttcctaattggtttttatgaatgttgacacttctagaatcttaaatagagttgtttattttaaagtagtcaaatgtccattcttttgcttaatggacttatttcacactgttatctggtacactttcaatctctgtaggtttttttacctacagaggtaggaaagattaggttagattgaagtttatcttaaatctatcttcaaattatcacaaaaacaagtttgatagaataggaataaataagattttcctacactgaatctgtagagctattttaacccggaaatgctgtcacctcaaaaataggccttgtataatgatacaaatttaactcacttaaaaaatactttctcactcttatccatacataaacttattttctaaatctttttcatactctttttgtaatttgcacttgtctctttaaagaatttttggtccattccaacacagatgttctttagggtatgactacccatccttatcagcatgatatttgtagacagcagatgtagatttgaaaaccagtttaattgtttattagtcatatcacattggatgggtcacttaactttccacaggcttagtttttgatataaaattgggattagtaccagccctgcctaaatcactggattcctctgaggttaaaatgagatggtatatgtgaaagccatttataaatggtaatgtgttgttgatattgttacccagagtatttgggacaccaaatgggcccacaataggtgaccgataaacacctactcagttgaatttaactggggagatagtatcgaatagtatctaacgccgtcacctcaacattgacacttggattttacaatcgaaaaaagctgaaccttgacttagtaggattatcactcaggtggcaratgtccaaacgttatcagccagtcgatgggtgcaccagcaataatcattctgttttcaatgcaattgtctaggtagatctaactgctggtcttattaggccmccmcttcatgatggtgtttattgagcctgatagagcattctttttttttttttttttttttttgagatggagtctcgctctgtcgcccaggctggattgcaatggcacgatctcagctcactgcatcctctcctcccgggttcaagcgattctcctgcctcagcctcccgagtagctgggtctacaggccccaccaccatgcctggctaattttttgtatttttagtagagacaaggcttcaccgtgttagccaggatggtctcaatctcctgacctcgtgatccgcccgcctcggcctcccaaagtgctgggatgacaggcgtgagccacccaaccagccaagcattcttatttgttagacgttacctggctttttctgagtttagtcttgcttactaaacattatttaatttgtgaattgccaaagttgagaataccattggggaatcaaatttctgtgctttcttatttgtaagtactttcttctggagtcattatttaacacataaaatttaagttctatttggtttcatcttttgaagtttgtttttgctattttgtggactttttaaaaactcttagatgtttggtaatattctttatatgaaatctgtttctttaacaattatttaaaatgtgcttatattatggccttcagacctatttaaaaaatgggtattttacctcatgcaaaattaatcattgtgagaacactgacaattagaagatcaacagttttcctttacctgatgcttagtttacagagttatggctataaatatttctaacctttttttccttcttgagacgtgtataggtctgtatatcatctagcattattttattaatctcatttctatttgtctgctctactactgttactctctaaagtgtttttgagcttgttttgttctaaactcagttatgatgtatcatttaaaattttcccccaaatatgtatgactcttatgagacagtcagaaagttgacaatgaaacatttgatattgagaaattattgccagaaatttttgagcatgacaatggaattgtacctgtccttaccttttagacatctgtactggactatttgcaaataaaattctttgatatatggaatttagttcaaaataatccagaaagattgtagatggggaggaatatggaagatactgagattgaccattataactgttgaatctgagtgatgagtatacacatgggtgctcattatacttttctatgtttggatatgtttgaaattcttcttaactttttttagttgctaaaaatcagacatactaacagtgtgacataagtcctcgtttaatgtcatcagtaggttcttagaaactgcaacttttagtgaaacgagataatgtataatgaaaccaattttaccataggctgattgatctaaacaagggttaatttcccgtggcatacagtacttcattttgcttgaagttgcagtttccaagaacctatcagccacattaagtgaggacttaaggtaatctgtaagtggtacgtgatttggctctcttttgctcttgaagggaatcatctgggctctgaccctggcttgtgtatttcattcccctgtcgtctgccttcagaccataagctgccttgtggtgcagcctggaccagcaggggcttgcattcgtaagcaaccatgaagtctttgtctgtctctcttcaaacaggcagaactatacaggtcaggtcaaatgaaaatgctctaagcatacccacaaacatcaacactcaggatggatgagctgctccctctccctgcatcacctttcaaataaaaatcaagtatcggttactccagtcttagatgtgtgcagatctgtattagaacagcaaatagagctaagaatggccactaattaaccctcagccttgtatagtgattaagctgagggtgagcacagctgcagtttcattggtaaaagctttattcttctcaaatggactgagcaaaagaaaagaggaatttgctcccagtggctcttttatagtgatctataaaagcttgggagaatgtttccttcttcattctccaacatcacaattttttgtttcagatcacttaaggccctttttttaagcaatgaaaacaattcttattcataaattgtctctgataccttagctttgattgttattaattgcttatctttggattagttatgattaggtagtaaattgtgttagtaaatattaaaattttacaattgatagtgactgctggtgggtgggaaccattaagtcagattaattatttcagcacatttatatttgtgtagattatttataccaagtttgggagccgctagactgatgaaaggtacatataacacctcagtaggattctagtgcttacacaatagtgtgaaccttgctgctgcatgtctcattctactatacttgagaactgaaaaagaacaatttctttaactgaaattcaggtaaaatggtaagtctacctgttttcaaagcagactgttttagcaggactacaaaaaaaaaattttttttcctagaacaataactacagttggctacctagataccagatttcttctgatgcctatggcttttttaaagtgaaaaatattaagtagaaatacgtggcacaacatatagctaacttcagactgttttcttgtgaaaagttggcttgtcttctgtcaacttctgtctacctgctaaattctaaaagtcactctaatcaatacttccaaatatggatgtggagagactccacattattgtcatttaacttcactggcacctcatacaaagaaaaggaaagctatggttatagagttcatactttgctcctgttgtttaagtaaatattaaataagtgctattaatcaatctacctggtatttttaatagcaagacagtaaacaaagttcaaaacgtttattaaagcctttgggttccaattcagtattacctgtagaatcctgggacaccgtccccttccctcccctaagtttcccataggcttactcagatgcatttgaaaataatgctattcataatgttgaggttctagaaaaattgaaggcttattaagatggatgaataaaatcagggaatatacgttccctgttttgtgaattaaagaagatatacagaagtgattgtgtaccatcataaatttggtttaaaaaaacaaaaaataacaattctgagatgcttaccttgacccctacatatttgtaaatgcaaattttaaatgatattaaaaggattatttccctactttgtcaattctgtaaaaataaaccatttctttagttgtcttacaagagatactggtgtataataatgcaaacaaaaatatccattagtttgtagcacttttaccaaagaatgattttctaggaaatactgaatgagaaaggaaagccaaaattaccccattgtaggcttagatcttggattccctagttgtgaaacaagtcaaaaggattcatcctctttgactcaaagagttaccaagaaaggattggtagcttcaggtgagggatgacttcatgacaaagcaaggatttcctatttagcccatggtatttctgctttgtgtgggcaagtctttatttataaccaacaatttgatatcctcctcaaacatccaatttgccttggtgaaaaggagcattaactgtttattcttttttgatagattcttactagaaatgctgacctgctaaaactttgttactttcataacttaaatatacgtcctttgataggtttgattcttttaaagatggttaaaactagactttaccatatttgctracatatgggataccttaaaaagtgcttttaaagtttaaagtttcacccttatctcttatctaactaaaagggcctttggagaaattacttccatttggtaaataagaaaatacagtgttgtgtttatcatcttcatgtatcttttccttacttctgtttccttacttctaacgcagggagtatctgtcaactttacttgacctataaagtgctaccagcatttttaaagtaggaaggtaaatcccttagagtgggaatctgtggttccttttctgtttctttttgactgttacagagttgttcacgcatccatttcaggtttctgattggtgtgttctgtaatagcaggtacagtaaaatcttactagttcagtataattgagaaaagatcagactgattttttttaatgaattggaaattttcactaagtgaagacgtaataattttaagtacatataggaaatattaggtaaaatgtgtgaactagatggcctctagactctcctttaccaaggaaaaggctgaagtgggtttttcacacattcacaaaaaatagagaaaatggttattataagtcccagtgtgtccctcacccagcttcagaactcacctatatttagtaaggtttaggaattagggttttttgtttattatttatttatttatttttagagatggggtcttgctctgtctcccaggctggagggcagtggtgtcgtcatagctctctgcagcttcgaactcctgcactcaagcaaccctcctgcttcagcctcccgagtagctaaatattctcagataatattgttttaataccattaattttcatgaaaaccatttttaaacaagacctagtaaatgtcagaacaggttgctgcatcagaattaagttagcagtggtgaacttaagggtatgttactaaaagatacagcatgtgccctgtggaagataagccactgagtaaagtttgatgcccttttgtttgtttgtttgtttgtttgtttgtttgttttgagacagtttcactctgtctcccaggctgcagtgcaatggtgcgatctcagctcactgcaacttccacttgctgggttcaagcaattctcctgccttagcctcctgagtagctgagattacaggcgcgcaccaccacgcccagctaatttttggatttttagtagagacggggtttcaccatgttgatcaggctggtctcaaactcctgacctcgtgatcctcctgccttggcctcccgaagtgctaggattacaggcatgagccaccgtgcctggcagactgacacctttttaaaaaaatagagagagagatgaaacctcattctgttgcctatgctggactgtagtggcacaatcagaactcactgcagccccctaccggaactcctgggctcaagtggtctcaagtgatcctcctgcctcaacctcccaagagctgggactataggcacatgccaccatacccagctagtttaaatgtgaaatcaggctttttaaatgtgaaatttttaaacatgaaattaagagaaattatttaaacagcatgyttaaacaatacatatttgaaattaaaataatgcattgttagtgttatggaaattccaatctgaaacagcataataaaacaactctaattattcagtaattgacttgtgtggacaaaacatccagatgattgaatgacattttctctttttactgtgaatacttaagattgtacagtatcttgggagaaatgttgtaattatgaaaatttgaagaattaatgtaacactaccaatgtctgagtcagatcccataacaaatgggcagttctctttattttacttattttctgactcaacttttcattcagtatctagcctgggcaaggtgctatcagtaacaacactcacagtgcctcttcctcagaaaagaaagcgcttccaaaatgtcagattaattattcctatacaactgtaataactactttctctttttcttctcttcatatttgttctttartagatcctggagcttaatgtgtattatggctgttgaatttttcatgtcatattggtgaataattcacacaataagcagtacaagagtttgcctaaattactagcatatttctttctggagcaggtctgttcctggaaaaaattacaaatcagaatattttacatgtattggaagaactttctgcttaagagtatcctacagggaaacctgttgccacatgaagcttttataaagttgaatttttggaaaatgcaatggttcttccccaccaccgccccaattcagcactgtcttccttctgaaagcattttcccaaataagacatattgtttgtgctattcaagtgcctcggccaaccaacaaatgcctatctgactatgtgcctataggctgatgtagttagtaccttttgacgtgactctttacaccagtgaggtaaaccaccttccttgcatacattgtgaccacatgtgtactccagtgactttcttgtccagactggctggctcctgtgatggaaaaaatgttcatacacagactaatttaaatacataagggaaactaggaagagtgcaggcctagagaagatgtcttcatagtttatctagctttggatgccagcattatatttttataagaaaaactctagaaaagagttcagcttacaatgcatgaataaccccgcatcactggggcaaaggcatattagagtgccagccacccgtggtcatcgtaggagggtacatttatctgagggatgtgtattttttaatcttggtaatagcctactagggatggtatattttaacttcagccttactataaatggttctgtatctgcgggtaatgcatcttttctgtagattcataatcaaaataatgtggttagcttagagttggggttaatcatatatgagttcaaaaagttaatagtccatgtccaatttggtaaaagtttgtaagtgaaaaattactatttgggggaagtttttgtttgcttctttgatttgctggagaaatgatttaaagttgcagtattgtaactaggcaaagaagcctttgatttagatacatgtgggagttgcatttggggaacttaggccatgtgtatcttcatagtattcatggtggagagagagtgttttcaggtgaaaaagaaagttttagattcattccttaataaaatgtattttctgtattggctttttgttattttcaaaattgatgtatctttattattttttcttatacaaataatacctgcttattaatttttaaaaatcagtcgtcttttcaagataagtatttaatttttatttgaggctctttgctctgggaactcaaatttggtgggacccagcaaagtatatttgtcagttaagtttgtctggttataatcttggtgtaaatttagacacgttgacctcagggatttagccttggctttgacctgcttttgcttagcatttccctatgcatattttattgtctcttaattaatataaatgtcgacatggattagctgttgatacaaattttcttttataaagtccattgctctccctgcagtagtaacctctaattggttggtttagaagttgatcttggctaggtggctcatgcctgtaatcccagcacttttgggaggccaaggcaggaggatcacttgaagccaggagttcaagactagcctaggcaacaaagtgagaccctgtcgctacaaaacataacaaacacttttaccacttctattcaacatagtaccagaagtcctagccagaacaatcattcaagagaaagaaataaagggcatccaaactggaaaagaggaagtcaaattatctctgtttgccagtgatgtgatcgtatacctagaaaaccctaaagactcctccagaatactcctagatttgataaatgaaatcagtaaagtctcaggttacaaaatcagtgtacacaaatcagtagcattgctgtatatcagcaacagccaagctgagaatcaaatcatgaactcatttcctcttacaatagctgcaaaaataaaataaaatgcctgggaatatagttaaccaaggaggtgaaggatgtctgtgaggaatactacaaaacactgctaaaaaaaaaaaaataataatagatgacaaacaaatggaaatacatttcatgttcatggattggaagagtcaatattktgaaaatgaccatactgcccaaagcaatctacagattcagtgcaattcctatcaaaacaccaaaatcctttttcacagaattagagaagacagtcctaaaattcatatggaacaaaaaaagagcccgaatatccaaagcaatcctaagcaaaaagaacaaagctagaggcattatgttacttgatttcaaattatactacaagtctgtggtaaccaacagcatggtattgttataaaagtagatacataaaccaatggaacagaatattgaacccagaaataaagccaaatacagccaactgatcttcagcaaggcaaacaaaaacataaagtggggaaaggacaccctattcaacaaatggtgctgggataattggcaagccacatgtagaagaatgaaacttgattcctgtctcttaccatatacaaaaatcaacttaagatggattaaagacttacattgaagactaaaccataaaaattctggaagaaaacctaggaaaaactcttttgggcgttggtctaagcaaagaatttatgagtaagaccccgaaagcaaatgcagcaaaaacaaaaataaatgggacccaattaaactaaaaaacttctgcacagtgaaagaaataatcctcagagtaaacagacaacccacagaatgggaagaaatatttgcatactatgcatctgacagaggactgatatccagaatctacaaggaactcaaatcagcaagaaaaaaacagtcccatcaaaaagtggacaaatgacatgaatagacatttctcaaaagaagatatacaaacggccaagaaacatatgtaaaactgctcaacattactaataaccagggaaatgcaaattcaagctacaatgaaattcacctcagccctgccagaatagccattacttacaagttaaaaacagtagatattggtgtggatgtggtgtgaagggaatgcttgtacactgctggtgggaatgtaaattagtacaagctgtgtggactatggagatttctcaaagaactacaagtagatctgaaggggtgggttgcccctccacacctgtgggtgtttctcgttaggtggaacaagagacttggaaaagaaaaagacacagagacaaagtatagagaaagaaataaggggacccagggaaccagcgttcagcatatggaggatcccgccagcctctgagttcccttagtatttattgatcatttgtgggtgtttctccgagagggggatgtgtcagggtcacaagacaatagtggggagagggtcagcagacaaacacgtgaacaaaggtctttgcatcatagacaaggtaaagaatcaagtgctgtgcttttagatatgcatacacataaacatctcaatgctttacaaagcagtattgctgcccgcatgtcccacctccagccctaaggcggtttttccctatctcagtagatggaacttacaatcgagttttataccgagacattccattgcccagggacgggcaggagacagatgccttcctcttgtctcaactgcaagaggcatgccttcctcttatactaatcctcctcagcacagaccctttaygggtgtcgggctgggggagggtcaggtctttcccttcccacgaggccatatttcagactgtcacatggagagaaaccttggacaatacctggctttcctaggcagaggtccctgtggccttccgcagtgtttgtgtccctgggtacttgagattagggagtggtgatgactcttaaggagcatgctgccttcaagcatctgtttaacaaagcacatcttgcacaacacttaatccatttaaccctgagtttgacacagcacatgtttcagagagcatggggttgggggtaagatcatagattaacagaatctcaaggcagaagaattttttagtacagaacaaaatggagtctcctatgtctacttctttctacacagacacagtaacaatctgatctttcttttccccacaagatctaccattcaatccaacaatcctactactgggtatctacccaaaggaaaataagtcatttatatcaaaaagacacctgcacatatatgtttatcacagcgcaattgacaatcgcaaagatatggaaccaatctaagtgcccgtcaaccgatgagtggttaaagaaaatgtgatatgtatacaccatggaatactactcagccataaaaaagaaggaaataacatctacggcaacttggatagagctggaagcctttattctaagtgaagtaactcaggaattgaaaaccaaataccttaagttctcacttataaagctaagctatgggcacacaaaggcatacaaagtgatatggataattggagactcagaagagaggaggtggggcagttggtgagggataaaaaactatatattgggtaaagtgtgcactactcacgtgtaggtatactaaaatctcagactttaccactatacagtttatccatgtaaccagaaaccacttgtatccctaacactattgaaataaaattaattaaacatttttaaaaatttttcaaagaacttgatctgattgaaaagtcactgtatcttatgaaaattctcttcagtttatgtttagaagacttcattttggagttwcccttaaaaattaccagtgacctatttttgttgtcattgttcttgttgtttagagaaacaaatatttcacttaaacaaacatcattctttactcacatgtcttttactcagaactatttgcccaagaaatgattcagagtttytttgtttcccttacttgaggaatttytgaagtcaagaacatttagatttttttttttttttttttttttttttttggattcggagttttactcttgttgcccaggctggagtgcaatggtgcgatctcagctcaccacaacccccacctcccaggttcaaacaattctcttgcctcagcctcccgagtagctgaaattacaggcatgcaccaccacgcctggctaattttgtatttttagtagaggtggggtttctccatgttggtcaggctggtctcaaactcccaacctcaggtgatccgcccacctcagcctcccaaattgctgggattacaggcatgagccaccgcgcccggcaagaacatttagattttaattaatttttaaaaattatcttttaatgaagataatgaaaagataaagattatagtggtgaaaacagatgattaattctctccactctagagtaaaaataacttttctctaatgacagggagagaattatgtattagtatatatgccagttatacatgcttttttcccatagttttatccgtgcttttttgatgacttggattattctgtttctgttagagttattttattgagcatacatattttattgcaaattgactcttgtttggcaaagtgaggtgtataaataagaaattaagtttttttgcttatggtaggatcaaggagcacattttgtaactaccctgctcactatttgggtttatttacagcttctctcaagagaggaataactgtgtcaggctttgctaagcaatctcgttccaacaataagacatttttttctgtgtctgttgtccagctgtttagtaggttcttggtctccacactaacagaaaggtttcaggtgttactcccaggcagggatttaccacaggtgtgtgtcttttccaccatttaaaatacccagaaatgatgagattattaagtagctgactatggtctgtatacttctcttagttcttcaccagttgctgcttttgaaattcttaagtgctatttctttattggttcatttgttttgctatttagatttatttccccattcagtctacatttataatgtggtggtctgttaatacagtaagcttgttrttggtaaatggagtcattctagtgaaatttattgtcagaaacacctgtacctgatttataactaatgcagcatggattttactttatgcaaattaaacaaatgtgttttaaaatttgataacagcataaaacaccctcgaggatgttgattgctcaccctaactcagaaggctctcaaagctgatacttctcttcctaaataggagacattcttttctcagtagagatccccatgtggctgtcacattcttttttcaggtcatctttcagaatgtactaccttctgagacctctgatactacccacccagccctaaggaggtcccagtgaggtgatcacattgacttttaaaaaacttttatgcccagaggatttgttaaggaagctattcccatactttgaagtagctgatgtcctcagggacctggtgtgaataccggagggaagactggagggaagagtgatactcttaaggttagcattagactctctcctctgcctgcctgcagagaaatagccaaatcagtgtgaactactggcttttatatacatatgttctcacatcagcttactcatgactgccttctaaagactgcctctttcaggaatcctaatagaaaaagcaactaagagaaagaaaatgaatcacgtcagaggttacagmaattataacctacaccatctttcacaactagaacatcatataaagctgtttcattatttttcttactccttttacacatttttcttactcctctttgtcttgttcctatcagcccagggactctgttgcattttgctttactttctggtgtttgtaatataaaaacaatttatctattgtacatgttttccatttccagtacatacacatgcacaaaccccaccttcacctcaggctttgatttgactccaccttcaagctggaagcctaaccctctatgggagtcactaagatggagccaatggcaaactgaagtggaccagcacttacttacttctttaagacagaactttgcggtgtattcttggttgttccttctctctaatcccttttcccgttagctggtctcttctctctgcatttccagcctcctgatttttctgctgctgtttctcttctcttttcttatccttatggttcacgtgctgctctcctccttaacttcatttaaccttgcttgcactcagtaaaatatttaaaaacaaacagaaggacttccaagccatattttttattttttaagagtagctttatttattattatctctataaccatatgactcagcctgtactgtctgttagaccaatatataatcttggaatatcccttttcacttcatgtgccaagttggtggctcctgttcttctggtatgccagggcaagaatggccccatcagctctcaaaagaggtacatagtagcaactctgaaaatgtggctgaacactgtgagtaatgttgtagttcttgccagtctcagccagtacctaccttcttaataaatggcctctttccccagctaaactgtttctttttttaacctactttggaaaatatattaaagtcctatactttgtaagcagcactgccaaagcagtatcatgcacatagcataataatctcattttgatgttctaaagttctttctttgtcctttgtaatggatggcaaggttttaaatgaaaacactggagttgctccatagcatgagatggttttttattgttttgctctaagctgttgccctgatctctactacatttatgcctgatttctctaagtcatagtgacatgcccttgcatgcatcttttcagcaaaccttatgatgcctattgctagacttatcagtgtcaggtcatgagaacaatgcaaggttataccttgccatgttaaagaaaattaagtcaaaggacctaagttatactgagttttgaagctgtcaagaaagccagagccttggcccagctctctcactaactagctagtgaccttggataaatcggtgccctcatttgtgaattaaagattgtacttctgaccctatcttgcagcattattgtgaggaaaaaatggtatgtgtggacctctgtaaacactttgaaggctatgagtatcattacgtggaatgttattgaactgaaagtccatattagctgtgttaggtgtgatgacctcgcctttgagatgtctaaaaaaggaatttcaaccgggcgcggtggctcacacctgtaatcccggcactttggaaggctgaggtgggtggatcacctgaggtcaggagtttgagaccagcctggccaacatggtgaaaccctgtgtcttctaaaaatacactaattagctgagcgtggtgggaggtactggtaatcccagctactcaggaggctaaggcaggagaatcgcttaaacctaggaggcgcaggctgtagtaagacgagatcgcaccattgcactccagcctgggtaacagagagagactccatytcaaaaaaaaaaaaaaagcaatttcattctcagcataaaatctttagataactcctttatagtttgttaagtttggagtttcaaatgtggtggaatttactttctataaaaaaactagtaggaagaatgaattataactcaaacttgatttaatgattttaatttgctttaggctcctatttttataatctagataactattgaggattatcttctgtcatctataaaatgaattatgagtctgcctctttattcccagcacctataatgtacaaactgtattcccctatgcaaccccatgtggccaaagggctccccgtgaaattgccttatttcaagcccaagcctcttttaaccttgactgctatccccactgttcctttgcttttactctgtataaatctcaggcataagagacaacttaaaatatgtcaggatattatattagataacaaaactcctagaggtcaaagactatgttgtccagagagttttgttatcgcaaactcctggaggtcagagactatgtctagttaagatgggagtgaaactcaactttttcacttctgcttctggccatgaagaataacaggagccagatttacactcctaccttagactacctttctagttagaaaactagacattccctgagaggagaaacagatgaagtaagccctacaattgtccccagcttactgcctagaagcagtttccaggatactgtacaaggagaaagaaaccaaagagagaggccagcagtgtcactgagttgaggagacagagataggagtttgggaagatcaagatggctagcatttgtggggcagaaacccagagaagagggattgtacagagagaatgccctagaaatctgaagagagatccccttgagcctttggttaagtttgcatataatcatcaaaagatcctgccttattagtagggatgaattactctaaagactacattgcatctgctctaacagtttaaaagcaagttttgaaagtatcatactgttcctaaataacttaactccctgttagagtaaaatgcaacattctttggaataaggtacaacattctttatggaaatacaacaaattccaacactcaacaacataaaaattgcagtgttcaacattccataaaatattaccacggacttaaaaggcaagaaaagagaattcataaccagttgaaaaataaataaaaatggaaaagactaaaacatttttgtttataaaagggcaaccttttaagttaattactaaagcattataactttggtaagtattctcaaattgatttagttcttaacttcatgaaatgtgaatgctttaagaattgaccagcatgtcttttgcttagttaaaaccagaatattaaactgaagagaaacttatgttggctctatattagtagaaacatgcaaacagctatactattcaaacttgctagtaacttggggctactatcattactgttactgtaggacttacatggctggccatttacaatctaaagaaatgtgagtgggaagtaagagaatcacagaaacaatatgttgcctcattggatctttgagaaggtgtggttagaaagaatgggggcagctggaagaggattatcctggagtagaggacaaagaaatgtggggatgagagagtaaaaaggatgactgactagagggccttgcatggtgggagatgacgatagggatgtaaagcatggtttgctgtagctggtcccaggctcggctagggcctcgtataagggtgtgtgctacggactgaactgtgttctccccaaaattaatatgttgaagccctaactcctaatgtgactatatttggagatagggcttataaagaggtaatcaaagttaaactaggtcataagggtggaaccctgatccaatgggattcatgtccctttaaggagagacaccagagaactctgtctttctgccttgtgaggacacatccagaaggcagccatctataagcccccaagagtcctcgtcagaaaccacatcagccagcaccatgatctttgagttcccagcctccagaactgagagaaataaatttctgctttttaagccacccagtctatggtttgttgtatggccacccgggcagactaatacaggtgtattaaagttttagtcagcagccaggcttggtggcacccccctgtagtcctagctactcggaggccaaggtagaaagatcactggagcccaggggttcgaggttgcactgggccaagatcaggacactgcactccagcctaagcaacagagagagaccccttctctaaaaaataaagtttcagtcagaatgtcaataaaaatattctgcatcatgtaccaattcccaggggactgagggtgttgagtagatctggatttcatgataagcgcctgtttaactaaactaatgggttgcttttcatctaggcacaaggtaaagaaagcataaacaaggacagtcaccaaggagaggttttgggttttaacatttctacagttccaagaaataaataggagttagcacaaaaggaggtgtacgtttgtttctgcattcccactctacagttgattgtctttgtacaatcagcttctttacaaattgtactttggaacttttaagaatgtaaggttttgtggcatttctgttagctgacctcagttctccatcagttgttgccacatgaatgcaagtacattctgaaatgctattcaactaccattcaaggctttgaacaggcagctattgccataactcattcagaaaaacacctcaagattaactaaaattgtctttattccatgctgttttcaatccagtctaaaaactaccaacatgtgtatagcaaaattaattttgcaaaatgtacgaatagtattttctatgtaaatttttttatgttaagaaaaaagtattttactttctaagttttgataaaccctttcttattgatttttaatctccttgattatatccaccctggagttttatggataaaagttgaagatgattgtaggagaaaaatgagagagaaatagaaattttctcttttgtgttaatggtaaagttagcctacttacctaaagataaaattaataaattacttgacagattttcattgttaatatagcccaaaatgctctatatttcccttttatagtatgatagaaacctttggtcacactttaataaaacaaaatgctatattaagaatcattgatattacattataaactttatgacctctaaaaaaaaaaataatttcaaagaagcataacttgtgagcatgtggtaaagcggcatcccactgaagatcagtgttactgcttttaatctcttttaagttaatacttcagtatactggtagctataactatagggcctttgttttggtcgatgatatttaacctaccatttatgttaataaactgacattgctcttaaagtaggttgtacattaaccacccaaaattggacatctgttgctgaaggaaatggtttcattttctgaatgcctctgttccctttatagtcattttttccattattgacaatagttatttgcatttttgtagacatgaggaggctttctcaaaagccgtatccatctaataaataaattcagtaaagttacaggatataaaatttaaaatctagatagaaaartccatggcatttctgtacacaagtgacaacctagccaagaaaagaaatcaaaacaatcccatttatgatagcatttaaaaattaaaatacttaggaataaatttaaccaaggagataaaagacctgtacactagaaaatgataaaacattgatgaaagaaattgaagaagacacaaatagaaagatatttcatgctcatggactggaagaattaatattgttaaaatgcccatactaccaaaagcaatatgcagatccaacacagtcactatcaaaatcccaagggcattgttcacataaatttaaaaaaaaaatcctaaaacttaccaaagaccctaaatagccagagcaatcctgaggtggggttgaggkgggaagagatatcacacttcctaattttaaattttatttcaaagctatagtatatagctatagtaatcaaaacagtgcagtactggcacaaaaacagacacatagaccattggtacagaataaagatttcagatataaatccaaacatatatgggcaactaattttcaaaaagggtaccaagaagacacaatggggagaggatagtctcttcaaataaatgattccggggaaactggattgccacatgtaaaagaatgaaattgagccaggcacagtggctcatgcctgtagcctaagctacttgggtggctaaggcaggaggatcacttgagcccaggagttagaggtcacagtgagctatgatcacactgcattccagactgggtgacagagcaagaccctctctctttaaaaaaataaaataagaatgaaattggacctttatcttacactatacacgaaaatcaactcaagatagataaaagacctgaatgtaacacctgaagccataaaactcctcgaagaaaacgtgggtaaaagctccttgacattagccttggcaatgatttcttgaacatcacaccaaaagctcaggctacaaaagcaaaaataaataaatgtaactacatcaaactgcaaaacttctccacagcaaaagaaacaacaaaatggaaaaggacaactacagactgggaaaaaaatatttacaagctgtatatctgataaggggttaatacccaaaatttatttttaaaaaaactcatacagttcagtagcaagaaaacatataatccactggacctgaatataccttttttttttttctttttgagatggagtatggctctgttgcccaggctggagtacagtgatgtgatctctgctcactgcagccttatctcctgggttcaagtgatgctgctgcctcagcctcctgagtagctggtactacaggtgcctgccaccacgcccgtctaattttttgtatttttggtagagataggatttcaccatgttggccagtctggtcttgaactcccgacctcatgtgatccacccgcctcggcctcaaagtgctgggattacaggcatgagccaccatgcccagcctggtcctgaatagacatttatccaaagatgacattaaaatggccaataagtatatgaaaaggtgttcagcatcactaatcatcagggaaatacaaatcaaaaccactatgagatatcacctcgcacctattaggatggctgttaccaaagagacgaggttaagtgttggcaaaggtgtggagaaaagggaaacctcgtatactcttagtggaaacatagattggtacagccctgagggaaaacagtatggaggttcctaaagaaataaaaaatggacccatcattccctctgctggatatatacccaaaggaaatgaaataccacctcatatagatacctgcactctcgtgttcattacagtattcttcacagtagccaaaatatggggaaaaacctaggtgtccatcagtggacaaatagataaactgtggtgtatacatacatacatacataaacacacgcacatacacagagcagaatattattcagcctttaaaaaggagatcctgccatttactgaaacatggaaggacattatgctgagtgaaataagccagacacagaaaactattgcatctcatttatatgtggaatttttctttttaaaggtcaactatataaagatagcaaataaaacaggagttaccaaggttgtagtgtggggaaggaactggaaagatgtaggtcaaaggatataaagtaacaagtagaaaggtctcgtgtrcaacataaggactatagttaataatagtgtcttcaggatttttttctaaatgagtagattatagctgtcttgccatgggggtggggagggaaatgggtaaaagtgttaggtgatgggtatgttaatttgtttcactgtagtaaccatttttctatatattgtatcttttaacaacgtgttgtataccttaaatatacaaactttttttttttttttttttttttgagatggagtcttgctcttttgccagactggagtgcagtggtgcgatctcagctcactgcaacctccacctcccaggttcaagcgattcttctgcctcaagctcctgagtagctgggactacaggcgtgtgccactgtgcccagctaatttttgtatttttagtagagacggtttcaccatgttggccaggatggtctcaatctcttgacctcatgatccacccgcctcgacctcccaaagtgctgggattacaggcgtgagccaccatgcccagccaataaaatttattwaaaaaaaaaaaaaaaaaagctatactgaacaagatagggcyacctcaaaagtaaacgtgaaaagaaagattagaatcattgataaggcattggtattaaaaaccagcttatcctagatttaagatgaaagcggtattgtggacatttgttaagtcctccaaaaccactaatagcttatttgaggttaaagagtcctcccttaaaatatgtactacaaacttatggtttagaatttcactgttttgcctcacacatgactttacaatgtgtaaatcaggaatccagcatttcttcccgtataccaacaaaatttatattttaaattaactcataataatctatataattttaaagcaaatgctgacattctgtgacccataaatagcacacatggaattggtatgtcctgtagaattattgctttctttacctatccgtaatgtacagtaagtcctcatttaacattgtcagtaggttcttataatgagaccagttttaccataggctaattgatctaaacaattgccaagtcccttcggcacatttctcatcacagacatatcaccaaactcctaaaggaagacctaaaacactcctaatactaaacattgaaatagatgtgagctatccatacatttaagaaacactaaatacaagtaagataattatttatccaattttagggaaatcagtgaatgacggtgtttgtgttggtggtggactaaatcaaataagtttttgcaaagcaaaaattgtgaggagcacctcctacaaccatgcagttcagatgctaaccaatatggcaggctcattgaatgctttcatactacatcatttactgttgcgcattttgtatgattatcatagactaagcacttctattttacaatcctttgtattcattcattcattttccagcttgtttattccagtttaggatctcagtcagctagaacccatcctggcagcccagggtacaagacgggaaccaaccctggacaggatgccattccatcgcaggacacactcacacacagacccatgcttcctcacactgggacagtttagatacaccagttcacttaaatacacctttggggtgtaggaagaaactggagtacccagagaaaacccacaccagacgcagtgagaacatgcaaactctacacaaacagtggctctgtcaggaatattattttttctcgtcaaccaacattgaacaaaatgacatattggagaccctgctgtagttaatgcaattgatgagattcaacttccccatcattaacttactttttcaaatataaggagcatagcagcctcatctataactttttccaaaggtaacttcccacttctttatcagcaagtcactctgtcactgtattttaatatcctcttgtccacaaaccaggcttacatagtcttccttggagtttatagggatctgacaaattctttcagaaagtcagcatagctttttgtctatattgacatcaacacactaggtcagcctatgcgtctaagagaaacatgtcaacatggctgtcttactgcrtttctcattgtttttctctagagtgatatcccttgaaggtcatattacagatcgttttatcaaaggcatgtcaacaatagtaactgggcaatggttggtttcacctaatgagataagtcctccaaaaccactgatagcttgatgccctaacaaaacccagttgtctaaatatttcaccatgacttcaaactagtctcaaacttaacrtaattgatctgcatgtttcattctcagtcctcaagagtacattgcttaagatgtttcttctataagtatagggtgaaagtgcagataaatccaagtgtgcaaatggtatttcacttcattattcctccttctctgcccctcagtttatacacctgggcaaacatagatgtacagacatatctttatgtagttatgtatatctttacagcttgatgcccgagtctcagactcatgtaaaagcaaatctggtaaatgaattcagattatgacgtttgtaccatcctgaaatcagtctccaagraaaggttcaagataccaacttatcagcagatttttttctgaaataaagactctcttcatggttaatttatagaatcttattcttactgtaacttttaaattggaggagattgggaggcatgacatataccaactttttgaatatggcattgtttcctagcattggtcaatgggatattgcccatccaggatgaggatattaatgtgactatttcaactcttctcttcactgaaatctgttcatctcagtgttatttattgccaggcacagtggcatatgcctgtattcccagctacttgggagctgaggcaagagggtcccttgagcccaggagctcaaagaccaacctgggcaacatagcaagaccccatttctttttataattgtatttatattaactgatctgagtgctaaaaataaattgtatagacacctttattcccataattagttattatcattcctaagaaattctaatgaggttagtcaaataagtcactggaaaactgaagtctcaacacaagagtaatataatgatttgcttatgggtacaggctgaatatattagaactccatgaactttagttttgacagattaaaaataaccagctaatgaaattaagcactgaagctttattcttaggttatccctagagaaataattcctcatttttattttggcttataacttgattacaaattgagagttggcttttttgtaccttttatggaattcaagtgcatttgattaagcatttaacatcactcccagaggcaagcaatctcaaagtgtcactgggcatggtaggcattaaacatcctggtttttctgacctgtagtcaaccttaaccgtgacctatcacctcctcaccacacactagattacctggaggcccttctctatcagaaagactatactagagatttgaacttcgtacaagtgagaattagatttaaattactaagctgattttcatttccgattttaatcaaaacttaaatacttgtctccagaaataaaagatagtcatgtttaactaataccagcagccctgtggctgtcctgccgtgagcagcttatcctccctcccccactcctttcctttctttctttctttttgtacaatgttgagttaaggtcaccatcatctactcatcactccaataagaattttaagtctggttaaaatattaaacatgaattgacaccacagtggtttggtatcatgcacgttagaaataactgctcaarttaaatgctgatgtttaattcttttgttatctttataggaatggttctccagtattattttattactgattttttaatgattatcctagactgggtaatttaaatatgtaaagctctgtaagtacatactggacctaatttgcaagtaaaaatatacctcatgcacatagtgggtgtgctctttagaggccaagaggctgttcagtatctgtcttaagatgtacctcccactctgtatctgtttattaatatggggctagaaatatctttctttttatatatgtatatatgtatttttttattttattttaagttctagggtacatgtgcacaacgtgcaggtttgttacatatatatacatgtgccatgttggtgtgctgcacccgttaactcatcatttatattaggtatatctccgaatgctatacctcccccnnnnnnnnnnnnnnnnnnnnnnnnnnnnnnnnnnnnnnnnnnnnnnnnnnnnnnnnnnnnnnnnnnnnnnnnnnnnnnnnnnnnnnnnnnnnnnnnnnnnnnnnnnnnnnnnnnnnnnnnnnnnnnnnnnnnnnnnnnnnnnnnnnnnnnnnnnnnnnnnnnnnnnnnnnnnnnnnnnnnnnnnnnnnnnnnnnnnnnnnnnnnnnnnnnnnnnnnnnnnnnnnnnnnnnnnnnnnnnnnnnnnnnnnnnnnnnnnnnnnnnnnnnnnnnnnnnnnnnnnnnnnnnnnnnnnnnnnnnnnnnnnnnnnnnnnnnnnnnnnnnnnnnnnnnnnacgtgtgcacgtgtctttatagcagcaggatttataatcctttgggtatatgcccagtaatgggattgctgggtcaaatggtatttctagttctagatccttgaggaatcgccacactgacttccacaatggttgaactagtttacagtcccaccaacagtgtaaaagcattcctatttcttcacatcctctccagcatctgttgtttcctgactttttaatgattgccattctaactggtgtgagatggtatctcattgtggttttgatttgcatttctctgatggccagtgatgatgaycatttttttcatgtgtctgttggctgcatacatgtcttcttttgagaagtgtctgttcatatcctttgcccactttttgatggggttgtttgtttttttcttgtaaatttgtttgagttctttgtagattctggatattagacctttgtcagatgggtagattacaaaaattttctcccattgtgtaggttgcctgttcactctgctggtagtttcttttgctgtgcagaagctctttagtttaattagatcccatttgtcaattttggcttttgttgccattgcttttggtgttttagacatgaagtccttgacccccatccctatgtcctgaatggtawtgcctaggttttcttctagggtttttatggttttaggtctaacgtttaagtctttaatccatcttgaattaatttttgtataaggtgtaaggaagggatccagtttcagctttctccatatggctagccagttttctcagcaccatttgttaaatagggaatcctttccccatttcttgtttttgtcaggtttgtcaaagatcagatagttgtagatgtgtggtattatttctgagggttctgttctgttccattggtctatatctctgttttggtaccagtaccatgctgttttggttactatggccttgtagtatagtttgaagtcaggtagtgtgatgcctccagctttgttcttttggcttaggattgacttggcaatgcgggctcytttttggttccatatgaactttaaagtagttttttycaattctgtgaagaaagtcattggtagcttgatggggatggcattgaatctataaattaccttgggcagtrtggccattttcacgataytgattcttcctacccatgagcatggaatgttcttccatgtgtttgtgtcctcttttatttcattgagcagtggtttgtggttctccttgaagaggtccttcacatcccttgtaagttggattcctaggtattttattctctctgaagcaattgtgaatgggagttcactcatgatttggctctctgtctgttattggtgtataagaatgcttgtgatttttgcacattgattttgtatcctgagactttgctgaagttgcttatcagcttaagaagattttgggctgagacaatgggattttctagatatacaatcatgtgacctgcaaacagggacaatttgacttcctcttttcctaattgaataccctttatttctttctcctgcctaattgccctggccagaacttccaacactatgttgaataggagtggtgrgagagggcatccctgtcttgtgctagttttcaaagggaatgcttccagtttttgcccattcagtatgatattggctgtgggtttgtcatagatagctcttattattttgagatacgtcccatcaatacctaatttattgagagtttttagcatgaagcgttgttgaattttgtcaaaggccttttctgcatctattgagataatcatgtggtttttgtctttggttctatttatatgctggattacgtttattgattttcatgtgttgaaccagccttgcatcccaggaaagaagcccacttgatcatggtggataagctttttgatgtgctgctggattcggtttgccagtattttattgaggatttttgcatcgatgttcatcagggatattggtctaaaattctcttttttggttgtatctctgccaggctttggtatcaggatgatgctggcctcataaaatgagttagggaggattccctctttttctattgattggaatagtttcagaaggaatggtatcagctcctccttgtacctctggtagaattcagctgtgaatccatttggtcctggactttttttggttggtaagctattaattattgcctcaatttcagagcctgttattggtctattaaaagattcagcttcttcctggtttagtcttgggagggtgtaagtgtccaggaatttatccatttcttctagattttctagtttatttgcatagaggtgtttatagtattctccgatggtagtttgtatttctgtgggatcggtagtgatatcccctttatcgttttttattgtgtctatttgattcttctctcttttcatctttattagtcttgctagcagtctatcaattttgttgatcttttcaaaaaaccagctcctggattcattgattttttgaagggttttttgtgtctctatctccttcagttcttctctgatcttagttatttcttgccttctgctagcttttgaatgtgtttgctcttgcttctctagttcttttaattgtgatgttagggtgtcaattttagatctttcctgctttctcttatgggcatttagtgctataaatttccctctacacactgctttaaatgtgtcctagagattctagtatgttgtgactttgttctcattggtttcaaagaacatctttatttctgccttcattttgttatgtacccagtagtgattcaggagcgggttgttcagtttccatgtagttgatcggttttgagtgagtttcttagtcctgagttctagtttgattgcactgtggtctgagagacagtttgttataatttctgtacttttacatttgctgaggagtgttttacttccaactatgtggtcagttttggaataggtgtgtggtgctgagaagaatgtatattctgttgatttggggtggagagttctgtagatgtctaagaagtatcttttagtgtgctcagcaagtcatgttattttctttgatgtrtttcttctttgaagcttttaacctctttgtttatctgtattgcatcctttaaagaattcaataaatttcaaattgaccatttaaggatataagcaagaatactcactaaaagtagctataagtgaaatattggtaaataaaattaraaggatcatttattctattaatattatttgccccaagtagttaatgaggtgtgtattttccrtaagactgcattgtttgtttttttctaggcctaagacagtatagcatgtgtgagggccaaaagttttgtcctgttacctctgacaagatggagcaaaacttagaggtctagagggttgatttaagcttccaaaaacaaaaraaagaaagaaagaaaaagaaaagaaaagagaaagaaggaaggaaggaaagaggttttttctgtttttttttaccattcctaagaacaaccatgtgtttgtgtgtgaagaatggttatttaagcagggaaaacattataggtacacgtacaaatgatacctgatttacaagtaaaaatataattgatgatgtaaatgtgagtgcattcacatttaggggcaataggtctgttcattgcctctccccacttcccaccccaaaatacagctctggacatatgcatgatcaatatgcaaatatacacagcatatttacattggaaacaaatgtagctagttatagaaaaataggtggagctgttttaagcattcattaaatctctcagtgcaaggggatgaattaaactttataaggctgctataaaaagaactattttagaatttaaatatggctgtataatgtagtgcttgttaccatgttcaattttaacacccaaatccaatctccaaaaaatactccaaatgagggtaccacattagggaacctgtgactgtgcccaccacacaagcattttaaaattggggcctcagcatgtctcattttatacagaattaaaaggaaattccttgaatttccaaacataattctgtggtttgaccagtcttaagtaaatatgatgttgagttagggtcctggtagataggattctgtcagcacatccacggsgtagaaagcctggtgctttccacctgttactggtctgcgcggtcacaaccaagaagccaggtttctacaactcatgttcttgtctttaatgatgtatcttggagaaagaattaaagtagtgtaatataaatgttgaaatgtatgtttaaaaattaaaacaccaatgagggtcacattttcatgaagaatgactggcactgctacttacatgagaagtaataatcaaaaccaggcatatgagaagggcaaggaaaaggtgcagttgtgtgccagacattgtgctaggtactttacagtgggagagtgggtggcggctttcagctgtgtaacttgaagaaccgaaaattcctccttgtcaaaaaagtaaacaatatacacacacacacagacacgcttttgttcccattattttgtgtcagtttcatttatttttgttaaatatagcttctctttatggttctctttgaaaatgtgcatccctctgggagagatgacacattaggtgacagtcacattatgatgtgagtcaaggtatatgaacgtgtcaggaaggggaaataggtcccggaattagccaaatagggagggagggaggcaaccagatgcaagccggatttccactactttacaaagctgctgtgcagtcttttagagagaggcccaactctaattattacactctcatgaacagtgagaaacttggagatttcttttgtatgtccttatcccaaaaataggcatggcttttttttttttttttttttttttttttcagtgaaagaggtttgcagctggactgggagaattaaggtgagaaaggtcaacaggttacagaggccagtgcaacagggcttgttagacgtaatcaaagacctgcttagggaagctgcaggaagcagaaggttgggatttccacctagggaggttataggggccctctggctaaagggaagttggctcaactctgaaaaggtttaaaatccagtttaaaattctgattaggaaaatcccacaataagcagttggtctttttaaatgtttcccctctcacagggcaagatgcttctgcctaatagttcagcatcattggaaaggacttagtgtgttcgcagatcactttgataagcgcttctgccacctcttttctttcctcctttttgtgctttaagaacctccgtcatgagatcgttttcttctttctgagattggtctccctagggaagaccagaatgacaatgtagactaaattgttgtccagagttgtcattcatttgttgcttttgaacttagagagatggaagccactacatattaatgcgttgttttaatgtataagccaacacctcacacttactgagcataaagttttttgccatgtattttcccttttttgcagtagtcttagccctctgtcaaattaacatgtttgcctcttttgaaaactcatatttcctcctgaaacagtaagaactaaggagaagagcaaagcattggaacagtccctgctgaagacaatagtatgataagaacattgaaaaatacaatttaataggctaaaatgcatttgggacatcaagttattggccagaatgcatctttatgcatagcaagccttgccagtggggatctcatggggagtaatggtgattaaaaggtttttgaagagcgaagttgtgtaaccaagcttgtataagagactgaaacttggttcatctcgtagtggacagcctgaagacagacactccagacatgtgttagtccatttgcattgctataaaggaataactgaggctgggcaatttataaagaaaaagttttatttggctcacrgttctgcagggtgtacaagaagtatagtgccagcatctgcttctggaagggcctcaggaagcttccaatcaatggtggagagtgaaggcaagtcacatggtgagagaaggagcaaaaacgaaagcaagaagttgccacactcttttgaacaaccagatctcattaccactcattactgagggaagagcactgagccgttcatgagggatccacccccctgaccccaacacctgccactaggccctagctccaacattgagggtcacatgtcagcagatttggaggggacaaatacccaaaccatatcaagaaagtatttggtggcccagttaagagatgacaaaggctacaaagaggaaggaaaggggaaaggccaagagatatctgggaattagaatcctcaggacttagtttccttaccactatggcagtatcagtagtgactgtgtcccaagctcaagaaagtgaacttgactgtgcctggtctctcacaaatttccagaccagtcttagtgaggtaaaaagatgcattctaggatcagtgaatattatttagtcatttcatgtacccagtgggttaatgcttctataactaaaacaagccattcccccttttctgccagcagaaagatggaaaacaaggttcacaatatgcttcccgtgatgtgttaggatttgtttggtcatgattttttatccataatagagggatatagtaagagtttgaatcccagaaatagaactgcccacttacttggctgaggcaggggtaggggagaagcactgtgtgtggacagaatttcgtcaggtggtagaacatgttgcctaaggggtttaaacaacagtatgttcgagttcaggcaagatgtcagtaaaacaggaaactactgaatacagactaaatgtaagaatctttatatatgataagaatcgaaaccttcagggactgaaagaaggtcatggggaatctggaagaccaagcaaaaggtcacttataggaaatggatcatgtctgctttagattcaaagccaagacagctgtatattaaaccccaaaaagtggcaccagacctgtcagaatgctcaccacgccaagtcagtgacttaaagagtcagtgatcctatgggtataaatatcagttaggcccaagaatggaaatgaagaaggatgtctagtctggaagaacctgccaccacccacaaactaagtcatcttgaccaataggttgaactgtacatgaatccatatattaaacaaatacttactgcatggtcatctgtggtatcctatatcctagacactttgttggttttgtgatataaaactgaaagagacactgcatccctcaaggagagggggaagttggcaggcacagagcaataagtttcctcctttttagaggtaatggttggtcccacctttagcagaagattcatataacaccctctcacaggagagaacaagagcaaggcctcagcccaaatcagagcccacactttcagtggacagtcactcctcagcacagacagcacccatgtgactcaccagactcccttgaccacagtttttccacagtcaaaggcaggcagaatggtctataaactgaaaccactgggttatttttatttcttggctcaagttcagattcccacacgtggtggagaccayggatacgtaacaatgtctagggcatgactgttgtattcacacccactatcasaattcccttgtcctactcttacccactgaagaggaatgtgaacagaaaagactttggggggtggaattgatatattttgcagtactagttactagtgggtggactacatgtgaggattatggaataaaaatttttttgaacaaaaggtgtgcattataaacaagtctcattatattattattatcattttttctttcgaggtgggagtagacagaagagacaatcaggataatcttgtctgtcatagccagagaacatcagaaaaatactccatttaaagagaatttattttctctggctggcagaaacaaacgcttgtatatcttatatataattatatacatatatatgtatacatatatacacacacatatatatgtatacatatatacgcacatatatgtatacatatatacgcacatatatgtatacatatatacacacwtatatatatacatgtatatacacatatatatgtatacatatatatatatatatgtataatactttataaaatacctggatacctggtgggtatagactaatgcagaataagctattctttaaaatctagtatccacagataataacaagtattggtgaggaagtggagaattagacattgctagtgggaatgtaaaatggtgcatctgccttggacagcactttagcagttccttacatggttaaacatagagttataagaccaagcaatcctacaactaaatatatacccaagagaaataaaaacatatgtccacataaaaaggtgtacacaaatgttccttgcagcattattttgtaatagccaaaaagtgaaaacagcctacatgtccatcagttgataaatggataaatataactgatatattcatacaatggaaaataatttgataataaaaaggaatgaagtattgatgctaccacacggatgaaccttgagaacatgctttgtaaaagaaaccaatcacaagagactacatattattccatttaggaaaagttttcagattagggaactacctagacaccaaagtagtttgattagtagatacccagacctaggactggtggatttgccagcggggagtaactgctaatgggtacagggtttctttttggaatgacaaaaatattctaaaatggattgtggtaatggttgcccaatcctgtgaatatactaaaaaccattaaagtgtgcactttaaatgggtgtattgtatggtatgtgaattacatctcaataaagctgtttttaaaaacctagcttccaatatnnnnnnnnnnnnnnnnnnnnctgcagctagagctttttgcagtggtatttgggaaaagtaatgtgtggacctctggtatcttaagtcctctactgtaaggatattttctgagatttcattaaaaattattacttaattaagcctggaattgcaacccaatagcttctcagtaggaatacaccatctgtgctgttctttagatgagtttattctaaaaggacattttatatttcaaagtgtgcattgatttaatgtatgtagcactgctatatagacttacaggctgagtttttaagtttttaaaaatattttatcaagtatatacagccattgtatttttactgttttatgagcactattgactcaaggggcgttaattttgaatggttttaattttatccagttactgccttaggctatgttttgtggaatcttgcttttctatcccttaacaatatctagcagatcttttagcactcactactgcgggtcactttctcattattagaaggtcaacctggtccatttttaaactcccatcttatacctgatttaaatctaatatcttctttctactccatcaaaatgcgaggaacatggtctggtacctcctttttccccctaatcaagccgtaactccttgcgggtgagggataggtaataagtgagaacagtgtccctttacctaatttcacatggttgtcatcttcctgcatctttggcaaatacagccttgccatccatgccttctgggtaacaggtgtcaaaatgcttcttcacattgggtaactgggagagttcactgcccagttccctgatgttgaagacctagcctagactcaacccccttgcccagcccagcccatttcccagtagtgtactggtaaatgtttaacaaaaggctgggcaggggtggtatgtgtatatgtacatacctaagtttattgtacattttactgatgtaaacaatgtatagtaaataatttacaacagtaaacaatgtataataaataatttataaattataaaatatacagtactcttaaatgtaaatttcatatagccagctgattcttccagaaaggcattgatatttgccaaactctttcctgtgtattcatcctgtgattgcacctgacaaatgagtatatttctaacatgactgttgggtgatattttcatttaagaaataagacaaagtgaaacaaagatgtcagagcttgtttttagtaatgtcatgagcaacttctttgctaaatcaaataatagttttcaaatactagaagaatgtgtcctccaatttttgtactgttcacagtgtgaggactctagagatgatagacttttaagtttaatctgcattattagcatcttctttatcacttccttaagtctagacagtcaacaataaatcaagtcctgattttgtaccatttttgcatttcaagttgccaacataactcttaataaatggataattgggacaagatgcatgctagcacaatttttcccaccatgcacatagacaataaaaaagtaagagcatagagggtaatagtaaactgattaagaagtgatgagtttttaagtattttctatgtttgtttttaatattacctatttaattataagtttgtataatgttttaataatggctccagagcaccactgcccctcacacacagcattcttctaagaatctctttgctatcggagtcccctcacctgtgtgctcctttcttttttttttttttttttttttttttttttttttttttttttnnnnnnnnnnnnnnnnnnnnnnnnnnnnnnnnnnnnnnnnnnnnnnnnnnnnnnnnnnnnnnnnnnnnnnnnnnnnnnnnnnnnnnnnnnnnnnnnnnnnnnnnnnnnnnnnnnnnnnnnnnnnnntctcaaactcctgacctcgtgatccgcccatctcggcctcccaaagtgctgggattacaggcgtgagccatcacgcccagcctgtgctcccttcttgataggacactgacaagatagcaaggatcgtacagaccgctttttttgccacttcctctctctactcagctagtctaggagcaggtcagcaggtcagctacctaagcaactcatatctgatttaaatttccagacagggataacactcaagagtctccttgaagacactctgaatctttactaacgaatctcttggtaccctcccgaagtggctttgagaaaggaaagccatcttttggaggggagggtgtggagaacaggacacctccactgccacacaaactacactcccaaggtagtagctcagtattcccacaaacgtcctttctcttctttttcatgttttatgttggactcctggagctggcagagccagcttatcttaataagtcctgagggagatattaatgtctccttggaatttgggatagttaatacctcttttagtatccctggttattgattctgaagcagtagcacatgttgctagatttaggcagttttatttagcattcccaattttagatctagtttgataatgtccattatttgatttaaatcatggaaatgatcgtttttctcccttaatcactacaagtcacacactgttatgtcttttgaggatacttaatctttctggtttgggttaagcctataattagtagtcaggtttttctaccttccaaactacaaaaacccaactttgtcctaatcacttcattttagactcagaggaattccagtgtttctaaatcctgataacattatatatgtatgtataattttaatttttattgtagattcagggagtgcatatgcaggttacaaaggtatattgcgtgttgctaaagtttggggttctgttgatcgtgtcacccagatagtgaacataatacccaataggaagtttctcagcccttgcccccttccccgactctcactctccttttgaagtccttagtgccttttgttcccatctttacatctgtgtgtgcccaggcttaactcccacttataagtgagacaatgcagtatttggttttctgtttctatgttaattcacttaggatagtggccttcagctgcatccatgttgctgcaaaggatatgattttgctccttttgattgctgcatgctatcccatgctgtatatgtaccacattttctttatccagtccactgttgatgggcacctaggttgaattcatccctctgcttttgtgaatagcgctgcagtgaatgtacaagtgcaagtgtctttttggtagaacaatctattttcctttgggtatatacmcagtaatgagactgttgtgtcaaatggtagttttgttttgatgacattatttagagggacatgagagtcctataccctggggtgaaatgctttaattgctccaagtattaatctcatcaagattagggttctcaaaaaaaaattacagaaggaaaggaatgaggtacgatgaggacttaatttactagatatcaaaccctactataaagctatagtgatacaaatcaggagtgagtaaagcaaaagacaaattattccgttgaaagaataacaagtacagaatcaggtccagatacacataggaagcttgtgtatgataaagttaacatttcacataaaagttactgtaaatataggagaaagtaaatacgcaaagatatttctaaactagtgcagtgaatatagagagcctttataaacatgcatcaaaccagaaaatattaaagaaagatggactgctttgamttcttaaattttttaaatttatatttggccagagacatcataagctaggttaaaggacaaatcatatactgggagaaaatattttttccacacataatagatgaatcgtgttatctttagaagtgcactaaatttattttggctgagtactaaacagccagtattaaaatcaatgaacagcctaaggcaaagctgaatgttcccatcataaaatgaccttctgagatataagaataaatatgaaattttattttcaagaacttaatgttacagttttattattaaagcatcagtatgtttttaaggtttgtcattatgatgtaccaatatcttttcycagtgctgccagctgctaggtggttcctccacacttgcaatacctaaatagctgcttgttgtcagctgattaaaagcgtggattttgtgggcaatgtacgccaatatgggttactattcatggagattgtgctattaggtcaataagctctcctttttcttgaatagtaacaaaagggtaaagtcttctcaactcctagacttaaaaacttagctgatgatgacacactgtcattgaaacaatttcacaaactaaagctgtgtgcaatgcttaaacaaaacactttgactgaataaaaaaaaatgtggtacrtatatgcaatggagtactattcaacagtaaaaaagaatgagatcctatgatttgcaacaacatggacggagctggaggtcattatgttaagtgaaataagccaggcacagaacgacaagcttcacatgttctcacttatttgtgagcgctaaaaattaaaaccactgaactcatgaagatagagagtagaagaatggttaccagaggctggaaaaggtagttggtgtcagagggagggaagtgagcacagctaatggrtacaaacagttagaaagaatgaaaaagacctagtgtttgctagcacaacagggtgactataataaaaaataatttaattgtacatgttaaaataactaaaagagtacaactggattgtccataacacaaaggatacatgcttgaggggatgaatactccatttgccatgatgtgattgttatacattgcattcccatgccttatcagagtatctcatgtaccccatcaatatatacacctactatgtacccacaaacattaaaaattataaatttttataaagaaagcagtttgcaggctgatctcagtggcacacacctgtagccccagctacttagaagcctgaagcaaaaaaggattgcttgagccaaggagtttgaggctatagtacactataatcatgcctgtgattaggcactgcacttcatcctggacaacatgatgagaccttgtccctaagaaagaaaacactttctcaatatttaagaagcagacataagacttctgccattacatttttatttctaatacttttgcattcacttgctgcttcacacagtcaccagatgtgctacactttatgccagcagctgttgcttgttaccaagtcattttcttttggtacaggttgagtgtccctaatctggatattgaaaatgctccaaaatctgaaactttttgagcacctacatgactctcaaaggaaatgcgcattggagcatttcagaatttggatcttcagattagggctactcagcctgtattagcacttgcagtggataacattaaaaccatgtttgttccagcagccttttaacatgtggtggctgctcttctctctcattttgaacatttgtgtgaatacatgtgtagacaatgccagatgtttccttcatatattatgtagtttgtctttggctaaaagagatttttagtcccaagttacattcagaatgcttaccaatatttaaaaatcagtattcagatactaacagtaagtccaagtgatgatgttatgcttactatatgtgataataacctatatgatctttgatctctacaagttcagtaaacctggaaatgacattgaatgaggcatttgcctattccgtcttccaaaagctaaagcaaattttgaccgagtactgaggccaaagcttagttatagtgtgttttcaatatttatagtgtataaagtgttccttcatattagaaaaaatggactaaggacatgaacaaaatactcacagaagaaatacaaatggtgaacaaacttgaaaaaatgttaaacttcagtaggtatcaaattaaatacaggtacaacgacagattatttttctgttagtttggaaaaaaaacaaaaaagctgataatgagttggtgagaatgcccagaaagagagtaaattgtacatacttttattgaagggtggtttggcagcatttaccagacatttaaaatgtatacagtggtccaggaatctgccctccagaagtactcaaatatgtcctcaaagatttatacaagactgtaatatagttctaacagcaaaaaatcaaaatctaaatgtgatcataaggggagtggaaaaatgaatgctgactcactatgcaaaggaatgccttatagttactaaaactaatgtgctaagtcaatatgtgctgtctcagaaacacagctacggtacattgttacagaagaaaatgcgagttgcagaatgtctgtgcgatttctatttaaataaataaaatatggaaggatgagggtcaaaccattaactgtagttgcctcaaggtggaagggggtattgagttgaagagaaggtagtatttttttactttatacatacttctgtattatttgaatttattataatgcacatctgttatgttttaattttataaaagatttaaataaaactaggctagaccaaaccatggaataaaagtattatgaaagaaacaaaaattaattatttctctcattttaagacaactcacagatagcctccagtgacttggggagcgaaaagaataacattaatcaaagatacagtggaactgccggaggacagtggatcatagccttgaagaatccaagaaatggcaaagtgcaggccacaaattccaataacaaaataattatgtttaaaaaaacataatttttaaattatgtttacataattagaggagaaaagtgaaagaatgctgttaaaatcaccaccatgtccctatctctgacttcctagtaatccttgagtagagacaggacaaacatctatgatgcaatctatttataatgctagtgctgcaaaggaacacctgccttgtggagtgactgtgctatatatggctgttgttgtgtgtataccttatctacttatattcttctaatcatccatccatccatgcagtaaacatatagggtaagagggatacagagatgacagacagtcctgtgaggggagaaacttgtttagcactggttctccagtacctggaacagagtaggggctcaataaatatttgttgaatgagtgcatgggctcccgtccagtgagaaaacagaaaagtaaacagacagctaaaaggcagtactggcacacctcgtttgacagtgcttttgtgtttcacatatactgttgttattgttttttttttttaacaaattgaaggttagtagcaagcccgtgtctgtcagccccatttttccaacagcrtgtgctctttcatgtctctgtgtcacattttggtaattctcacaatatttcaaactttattattatatcctttatggtgatctgtgatcagtgatctctgatgctactattgtaattgatttgtaatggcctctaagtgttcaagtgaaaggaagagtcaaatgtctctcactttaaattgaaagatggagataattaagcttattgaggaaagcatgtcaaaagccaaaacaggccaaaagttaggcctcttgtgtcaagnnnnnnnnnnnnnnnnnnnnaacacacccttattgctgatagggatttagtggtctggatagacagtcagaccagctacaacactcccttaagccaaagcctaatccagcataaggccgtaactctctgcaatcctgtgaaggccgagaggtgaggaagctgcagaaaaaaagttggaagctagcagaggtaggctcacaaggttttaaaaaagaagccatcttcctaacataaaattgcaaggttgagggtgaccaaggaacaaggcaggtgcaagatgtagaagcagttgctgatatagaagctacagcaagttgtccagaagatctagctaagataattgatgaaggtggctacattaaacagattttcattgtagatgaaacagccttctgttgaaagataccaatctaggacatttatagctggagagaaatcaatgcctggctacacagctttaaaggacaggctgactctcttagtaggggtctaatgtagctggtgacttcaagttgaagccagtgctcatttaccatttcaaaaatcctaggacccttaaaaacttgcctgtgcctactctgcctgtgctctctgagtggaagaacaaagcctggatgacagcacatcttttttartatgacgtactgaatattttaagcccacggttgagacctacctctcagaaaaaaaaaaaaaaaaagattcttttcaaaatactagtactcaaagatctaatatccagagtctacaaggaacttaaacaaatttacaagaaaaaaaatttaaaagtgggcaaaggacatgaacagacacttctcaaaagaagacatacgtgtggccaataaaaatatgaaaaaaagctcaaaatcactcattagagaaatgcaaattaaaccacaatgagatatcatctcatgccagtcagaatgtctattattaacaagtcaaaaaacaacaaatgctgtcaacattgcagagaaaaaggaatgcatttacactgtggatgggagtataaattagttcaaccattgtggaagacagtgtgatatttcagtgacctagaggcagaaataccatttgacctaccagtcccattactgggtgtatacccaaaggaaaataaattattttgttattaagatacgtgcacacatatgctcattgcagcactactcacaatagcaaagacatggaatcaacccaaatgctcatcaattatagactggataaagaaaatgtgatacatacacaccatagaatactgtgcagccataaaaaggaacaagatcatgtcctttgcatggacatggatggtgttggaagccattatcctcagcaaactagcacagaaacaaaccaaacaccacatgttctcacttataaatgggagctgaatgatgagagtacatggaaacatggtgaggaacagcacacmctggggcctgtcagagggggcagggaaggggagcatcaggaagaataactaatggatgctgggattaatacctaggtgatrggatgatctgtgcagcaaaccaccatggcacgtgtttatctgtgtaacaaacatgcacatcctgcacatgtacccctgaacttaaaagttaaaaaaaaatttttaaatactactactggttgataatacacctggtcacccaagagctctgatagagatgtatgaagagttgaatgttgttttcatgcctgctaacacagcatccattctgaaggccatgtatcaaggattaatttcagctttcaattcttattatttaagaaaactaggcagggcgtggtggctcatgcctataatcccagcactttgggaggccaaggtaggtggatcatgaggtcaggagatcgagaccttcctggctaacatggtgaaaccccgtaaaaatacaaaaaattagccaggcatgatggcaggtgcctgtagttccagctgctcaggaggctgaggcaggagaatggcgtgaacccaggaggtggagcttgcagtgagccaagatcgtgccactacactccagcctgggcaacagagcaagactccatctcaaaaaaaaaaaaaaaaacctaaaagcctgggtgtggtgactcatatctgtaatcccagtgctttgggaggctaggtgggaggatcacttgaggccaggagtttgagaccagcctgggcaacatagcaagaccctttctcaacaacaacaacaacaaaaattaaaagttagccaggcatgacggtttgtgtctgtagtcctaactacttgggagactgatacaggaggatcacttgagcccaggatcgcgaagttacagtgaactacgatcgtaccactgcactccagcctgggcaacagagcaagaccctgtctcttaaaaaaaaaagaaaaaagaatactatttcctaaggctatagtttccatagatggcgattctctgatggatctgaccaaggtaaattgaaaaccttgtgtaaaggattcaccattctgtgtgccattaagaacatttgtgattcatgggaggaggtcaaaatatccacattaaccagagttttgaacaagttgattccaactctcgtggatgatttgagggtttcacaacttttattggaggaaataactgcagatgtaatggaaatagcaagagaactagaattagagtagtacctgtaaatgtgactgaactgctataatcttatgaacaaacttgaacagatgaagagttgcttattatgggtgagcaaagaaagtggtttcctaagatgaaatctactggtgaagattgtttgaacactgaaatgacaacaaagtttttagaatattacatataaacttagctgataagacagtggcaggatttaagaggcttgattccgattttgaaagaagttctgtaagtgaaatactgtcaaacagcaacatcacatgcacagagaactctttcctgaaagggagagtcgatcgatgcggcaaactgtattgttgtcttattgtaagaaattgccatagccaccccagccttcagtaacctgatcagtcagcagccatccacattaaggcaagatcctccaacagtaaaaagattacgacttactgaaggctcagatgattgttagcatttttttagcaatatttttaaggtatgtacttttttaagacataatgctattgcacacgtaatagactacagtataaacacgcactgggaaaccaaaaaatatgtgtgactcactttattgtgacattcactttattgcggcagtctgtaatcagacctgtaacatttccaaggtatgcctgtatttgcagtgcaatgatagagatatgaacaaacaaatcagagatgggacacataagactgctaggaagcccctggaagacatcctcagggaggctatgcttgaactaaatgttgagaaatgagtagaagcctgccaggtaaaaaagtagaaaaggttatcccaggcagaggaaccaacataagcaaacaaacataatcataaaagagcagggcttatttttttattgcatattttaataacttgattcaggtaatcagatgtcccagaaaatatcccaaactttacaaaatatcttaagttttaaaaatccttatggtaatgtcacgtaacttcctatctaacgtcagatctgattcatgttaaacacgttttgcatatggcaaagggcttttatttcaggtaaatggtgaaattgttggtccttttattatttttttaatttttatttatttatttttgaggtggggtctcactctgacacccaggctggagtgcagtggcacaaccatagctccccacaatcttgaactcctggactcaagggatcctccagagtagctgggactataggcatgcaccaccacacccagctaatttttaaaaatttatgtagaggcggggtctcgctatattgatcaggttcatcttaaactcctggcatcctcgagcagggcttatttaaaaagctgaaagtcatttattatggttaaagcatgaggggaggaggctagaaagataaagtctggatcacagaagaccttgggagccatgctgagtttggattttatctgaagagaatgtctttaagaagacaatcaggtatatattcttaaaagatgcacacaaatacatatttgttttcaatttgtatatgctttacaaggattaattcacttaattctcataacaaactatgaagtgtaggtaccattattctccccattttgcagttgaggaaactgaggcacagtaatttcccaaggtgacctgactccgtggtggaactaagttaaaaacccagacattctggatccaatgcccatgcccttttccactatgctatactatctttgtgtttcttcaagatgtgtatgttttcttatgaaaggggaataaaaaaatttttcgtgtaatttcttccataccacctaccaaccaagatagaatgttctttggtcttgcaaatagagtcattcagcagttcagcagtctgcctgtcttttctccatttcctcaggattcactttcctcttaccacttagctgctgcttatcccttttagtctggattttttgttttagtttcaggggtacatgtgcagatttattatataggtcaattgcatgtcacaggggtttgatatacagttggttttgtcacccaggtaataagcataggtagtttttctatcctcacccttctcccaccctccaccctcaagtaggccatggtatctgttgtttgcttctttgtgtccatgggtactgaatgtttagctcccacttataagtgagaacatgcggtattttgttttctgttcctgtgtttgcttaagatgatggcctccagctctatccatgttgctgcaaaggacatgatctcattcttttttatggctgcataacattctattgtgtatatataccacggtttttttctttatctagatagtctaccattgatgggcatttaggttgattccatgtctttgctgatgtgaatagggccatggtgaacatacacatacatgtttctttatgatagaaatattcctttggatataccccgtaatgggattgctgggtcaaatggtaattctgctttgagttatttgagaaatcaccacactgctttccgcagtggtttgtggaaacgctttacactcccaccagcagtgtataagcattcactttcttcataacctttccagcatctgttattttttgacgttttaataatggtcattctgactggtatgtgatgatatctcattttggttttgatttgcatttctttaatgatcagtgatcattttttcctatgcttgttggccacatatatgccttcttttgagaaatgtctgttcatgtcctttgcccaccttttaatggggttcgttttttgcttgtaaatttaagttccatgtagactctggatattagacgtttgttagatgcgtagtttgcagatattttctcccatgctgtagagtgtctgtttattctgttgagtgtgtgtgtgtgtgtgtgtgtgtgtgtgtgtgtgtgtgttgtgtgtttgtttgctgtgcagactctctttcatttaattagatcccatttgtcaatttttgtttttgtcgtagttgcttttggagtcttcatcatggaatttttgccagggcctgtgtccagaatggtatttcctaagttgtcttccagggttttcatagttttaggttttacatttaagtctttaatccatcttgagttgatttttggatgtggtgtaaggaaggggtccaatttcaatcttctgcatatggctagccagttagcccagcaccatttattgaatagggagtcctttccccattgcttatttttgtcagctttgtcaaagatcagatggtcgtaaatatgtggcattatttctgggctctttattttgttccactagtctatgtgtctgtttttgtaccagtatcatgctgttttggttactatagccttgtagtatgctttgaagtcaggtcatgtgatgcttccacctttgttctttttgcttagcattgctttggctattcaggcccttttttggttccatatgaattttaaaatagttttttctagttctgtgaagaatgtcattggtagtttgatagaaatagcgttgcacctgtaaattgctttgggcagtatggccattttaacaaacttcttcctttccatgagcttggaatgtttttccatttgtttgtgtcacctctgatttctttgagcagtgatttgtaattctcattgtaaagatctttcacctccctggttagctgtattttattttctttgtggctattgtgaatgggattgtgttcttgttttggctctcagcctgtatggtgttgatgcatagaaatgctactgatttttgtgcattgattttgtatcctgacactttgctgaagttgtttatcaggtcagggagctttggggcagagacagtggggttttctaggtatagaatcatatcgtctacaaacagggatagtttgacttcctcccttcctattcgaatgcattttatttctttctcttgcctgattgctctggctaagaattccagtgtaatattgactaggagtagtgagagagggcatccttgatttgttctggatttcaaaaggggtatgcttctaatgtttgctcatttagtatgatgttggctgtgggtttttcatagagggctcttattattttgaagtatgttccttcagtgcctagtttgttgagggtttttaacatgatgatatgttgaattttaaaagccttttctgcatctgttgagatgatcacgtggttttttgtttgcgttgtttatgcratgaatcacatttgttgatttgcatgtgttgaaccaaccttgcatcccaaagttaaagtctacttgatcatggtggatttgcttttttgtatgctgctggatttggtttgctagtattttgttgaggatttttgcatctacatccatcgatcccttttagtcttgttccctgtctctgtcctcccttttctaggtgggactataaaccctttggcttccagggtacccagtgtagctccatccattaaagaggcaaggtgggagttgtctgagcctttttcctctagaatcaaaggtgcacataccacagatctcaaaaaatgygaagaggtagattacgcaatatgacaatctttttttttttttctggaaagacggtctcgctctttcgcccagctggagtacagtggcgcaatcatggctcactgtaatcacgaccccctgggctccagtgaacctcctacctcagcctcccaagaagctgggaccacaggtacatgccaccacacccagctrttttttgttttttgttttttttttttttttttgtagagatgggttctcactgtgttgcccaggcttggtctcaaactcctcggctcaggccatcctcctgcctcaacctcccaaagtgctgagattacaggcatgagccgctgtgcccagttggtatgacagtctttcactcgcttgcaaataatagtgattgttagttgacaggtatgtactctttgcttctaaattgtgtagggagacagaggtgagatagaggaagtagaggtgagtaagaagaaggtatgttccccttcatcagtgatcttgcagtcttacgctttcattcaggttattattttatgactggtattttgttaacaaaaatgccatgatgctggcttggagcagcggctcatcctgtaatcgcaccacttttggaggccaaggtgggaggacacttgaagctaggaatttaagaccagcctgggcaacatctgccgtctctaccaaaaaaaataaatcaataaactggacatgctactgtgtgcctgtagtcccagctactcaagaagttgaggcaggaggattgcttgagcccaggggtcaaggctgcagtgagctatgatcccaccactgcactccagccagggcaacagagtgagaccctgtctcaaaaaaaaaaaaaaaaaaagacatgatttttattaaacagatgaggaaatgtgatttagaggaaagctttgtatacctaacttccatctctatgatattctgttaaccacactgtagatcctatacttctgcctcaggaaacctctaatacatgccatactggtgtttgggagaattaagtacttgaagtcatctaactctgttctgcataagtctgaacatgctcctcttttcaaaagtgtaaataatttttgaacaaaaacagaaaatgtgggaggctttgatttcaatttacttatctactgataaattttgtggcttttctttagtaaaaatgaggaaaactgacagatgataatctcaaatattaataaagatttgggaaaatagtaacaatctagaaacccaaaatgatgggaaatattttcttcttgttagagaaatagggtacagtaatttatgtttggagcctggcttggatggcagagtgaaactgtctcaacaaaaaaaaaaaattatttggttgataacatgttttttttttttattaccttttagtgttgctaaattcatgacttttatttaccatttattaagtttaacattctgctaagaaacagtattttcagactttcacattgaaaagtcctcccttaattaagcatatacaatttaccattttcagcagagatccattttcacaactagctcttcaggattattccactgagctgaatctttatgtgcagcatatgaaaaagtagtttgtagcctttttctcctttcatgaaatattagcttaaacatcagcactgctactgggggtaatattcagaaaatcatagggacatgtaaattgatatgagaagatagttactatgttgaatagaattttaagtgaacatcaaatactaattgttagtggtcttttttatttttttagaaacagagtcttgctctgtcacccaggctggagtgtggtggcatgatcacagctcactgtagtcttaaacttctgggctcaagcgatcctcccacctcagcctctcaagtaggctggactacaggggcacaccaccacacctggctaatttttgttatttttttgtggagttgggggtctcagtgtgttgcccaggctggtcttgaactcctggcctcaagctgtcctccaccctcagactcccaaagtgctgggattacagacgtgagccatctgacccagccaataacatgatttttttaattccttcattgtgtatttttactttatcccttcattttatactttaaacaaatttaagatttgtataacttccaaagatgcatgcatggtaatggtcctcacatcgttgtttttaaaacaaaagttggagagtacccaaacatctaaaaacaggaaattcgttcttaattcaggtattagaaatgatgaagtagatctacaattatctatgtaaaaagttatttaccatatcggtataaaaatcatagttattttttaaaagattacaaaagcagactataaattaatcccttttttttttttacatcatgtgattagaagtgtaggaagaaaacataccacgatgttaacagyagttttctttgcgtggatttatacacgagatggtctttactttcaacttyctgtcttgcatattgtctgaggtggttttctaaattattattaattactgttttatagttagtgtgtataattttacaggtggaaaaaaaattttttaatcaaatttgaaaacgtaaaagaaccttgaaagcaattaaatgttaagcatgcaaaaaaaagtttgcacaacgcacgctaattgttaccagcactctaacttgtttttaattgtttctccttttgcctgtactgaaatactattaacagttgatatgacacattttcccaccccacagcttcttgttccctttattcttcatttgtttccctccaccccctttgagctgaagtggcagacctgtcttattcccagtgtgtacactctggatgtgggtacagtttgaggtggaacatataagtcagtgttattcttctgacattgagccttaccttcatcagtaagttagaatggatcttcaatgtgtttcactaatataagttctatttaattaaacacctatcttgagtgatacagacttaaactattaaggatgcccacgtttcaccctactctttgcattctagaatgccaggaatcagaacaagattactttttttgaaggtagagaaatgtgactcagatttcactttggcccctattactctaatgtcattacttaagctcaagtgaaaggctacatttttaaaaaagtatcctggccaattgccagatattttgtgtctgtatttggtagtgctggtttaaatcttgttgaatcttgactggactgggtgaaatggtagagttttcatttcaacatctgagaaaatgaagaagaatcacaaagagtaggcagagaggcaaacgtttcgaacaaacccacatactaagtagtctactaattgtgatataagtgaatgtaggaaactggcttctccctggaataattattacgagatttacacaattccaggaaaacttaagcaagtcttgttgagcaggctttcaaaggctttgttatcatgagcttcagcagataggttaaaaagtggtgtttctattatacctttcatattgagaacatatgaccatgagtgccttacaaggttagtctcaggatcttcccaagttgccggtggtgttgggccacagacgtagttccatattctctactatttttttcctaccaaacattagcttttgatgatttttctcattttccctagtggatcctccttacctgactgctctaatatacccaaattcccaataccaaaaataggggaaatrtaaatcggggaaagagtgaaattagagaattggagggaaaagagtagaatctgggatctttaggaacctaagttactttttttttaattgctttgctttttgtttttttgtttttttgtttttttttttttgtctttttttttaaagagggtctcactctgtcacccaggctggtatgtggtggcacgatcatagctcactacagactcaaactcctggactcaagcgatcctgctgcctcagcctcttaaagtgctaatattacaagcatgagccaccgtgccccaatttttttaattaaacgttgacccaatcaatattctggatagagagctatctcccagcaccctgttaagttaagcaccctgttaactaacagcaccctgttagttaagagggtgaactctggctccaagccctgctccacccctttctccacgttgggcaagagactcagcctccttatgctccaatttcctcctgtgtcagctccttagaaatccatgtcattaacatattagagttttaggacatggttagtcatggtgagtgttagctattattaacatctattagtatttttgtaataatgagctatgtaggttggatgttaccaaattttgaggaagaagtggaccatctctcccctcttttgactgtccagctcagactctggcgtctcctcagataaggtaatctggcaggagaatgccacctgcctgtggtgctagcctagggtaaggagttgtccagaccgccaaacgtcttcccaggagagctcatcaagagcccatgagtcccctgcccacagcccacctgcattttctccgtgaaatatctacttgaagacaggcatctcacacctgtaatcccagcactttgggaggctgaggcaggaggataacttgagcccaggagtttgagactatcctggacaacatagtgagacccccaaaattacaaaaaaaaatttgaaaattagccaggtgttgttgcacacacctgtggtcccagctactcaggaggctgaggcaggaggaggattgcttgatcccaggaggtcaaggctacactgagctgtgatcatgccactgcactctagcctgagtgacagagcaacaccctgtctcaaaagaaaaaaaaaaaaaccaatacgaggggagcaaggtgagaagtatgtggtgggtacagggaaagagaataagacttgtcaagaaatatgacaagagctatcagtaaaatacagataggtgactcttggggcagctggtgtgaaatgtagtctgtcagcagcaggtgactggctcagccgcagcaatggtggtccaggttagaacagcagcttctcatctcctaccctcccactccttgccagctttctgaacacttcttcccccacagtgctggtatttactgactcccaactctgctttccttgcagctgaccctctggtgggcagcatcgccacacagtacatgaccaacagagcagagcatgaccggatggccagacagtggaccaagcggtacgccacataggggcctgctgcctgccgccccgcgggacctgtgcaagcacattcaccaagtgcatcggtagccctgcccacccctccagacctcggttcttattttcctatttttattaaatttggaaccattttgtgatggtatgttgtccatcttcccatcccagttcttcctgccccccttcctctctcccacgctctcttttatctctcattttattcccttgttgatttctgttaacttgaaagatttgggattttttcccacctcatcatagatgggaacttttgttttcagtgcaaacaatgttggagctgtaatagtaagagctttcttacaaagctttgtattactgtgtggttttgttttttttgttgttgtttatttgattttgatttttttttcttttatgtgatctttgggaaaacacattcagaattatatctcgtttctacttaaatgtagtgcttagggttaattttttgtactgaagtctttattggtgggtgcatgctactgggaacaagtttttgtacaaaagcttcaatcagaatcactgtgcattactgagactctgtttatcactagccttctgtccctcccgcagaagactgttggattgaacaaaataatatgtattttgatttacttaaagtgcttgtaaatttcttagggacctgccacttttgactgtggatcagttgatgtacacttgtattattaaagcactcaataaatcactgtggctgataactgcacttctggtaacccgacatttgctttgtgtcctggtgaccgctgtagccctacgtgcagtgaggcttgtctaattcaattacaggttcaagtgtatttttcatctcaaacctctaatatttctttggagttgagttgcttagcatgtggaatttctccagctgtcagtagcctgatgattttatggttgttatagtaaattgctatcattttacatattgactgggcattctttctgttacagccttctttatcaacaattaaaatatgtaactccaaaaatagccttcttgtgaaagtgaagtctgagctaatcattgtgttcagccactttcaactttatttctctcaaaattgttacagtgattgccctcaagctttgtattgttcatttttgttgttgttgttgttgttgttgctgctcttttttctccatgattttagcaaaagaagtaaactcaactgtattggtcacggtcagcccattcaatgacaagggtgtctgtctggcttcaccttcaggctattttagtgtgcagctataggaggcagaggaaacgtgggtggtgtagtttctaaaacacgctgacttgctgattgataattcagggttattagtgtaacaaagcgtagtggaaactcctactcctgctgcaccatacagttacagaccctaccatactcttggtctcatttaaggaaccattaacaccttcactgctgaaaagcaggatttataagcataagtcatccacctctaaatattttaacatttaaaatgcctgattcaaaagatacagtttttgttgtttttaactagttaaaaataaatcctaagaaaatatatttaaatattgcaaatgccacttctaaaccaaaatacctgagaatattttttgtctttttaataacgattttaccattcattttatttaaaaacatttctcagcatagcagggcactgtatggtctctgatgcactactcaaccctctagttgtagtagagggagccacagacagtacataaatgcattgggcagagctatattccagtgaaactttatttaccaccataggcatgggatttggcccatgggttgtagtttgccaatccctgacacagaccaacatagactgggggctggatgaaaaacaaataacgatgtgtcatttctttctttaacataaaataaattcaatatggtacaacactgatttttggaaagttgctcagaatgtttaattgcctacagtttctcaccacaaagttttttatttttacttcagattttaaaattcagcactaaaggcattgaaccattgaaaataaaattttattaaactgcttttttcccctacttttggctgattaaaccagacccataatactaatactttaaagacaatctttataggcagtttttaaattaaatttttttttttttggtctgtagcaacaaggtctcactgtgttgcccaggctggtctcaaactcctggcctcaagtgatcctctcaccacagcctccaaaactgctaggattatataggcttgagccactgtagccagccaacacacattttaagtgataaatatattacattgcacatttcacatctacttgtacatcagaccatttaaaaatgtgttattaggccaggcttggtggctcacacctgtaatcctagcttgggacgccgaggtagagattgcttgagcccaggatttcgagaccagcctaagcaacatgacaaaacccaggctctacaaaaaaatacaaaaatgagctgggcatggtggtgcacgcctgtagtccccgccactcgggaggcttaggtcagaggatcacctgaacccaggaagtcgaggctgcagtgagccataattgcgccagtgcaccccagcctgggcaacagagcaagacgctgtctcaaaaacaaaacaaaatttgtgatatttaggaaccaaagattacaacaactctagtaggaattctagtcactgacctgtttgttttcctgtgacccatttttaggtttaatgcccatctgtgatatgaagaggctgtaaaacttctctccccaactttatgatttattcatacttcatgacaaatgtacacagccctcaaaatgtaaaagctagagaaactccagagaaaccaacaaacttagtagagctgaagtctagatttcaaataacatggtcattttacttgaaatctgtaattgcagcaggcaatacaattccaataaattttttaaaatgcatgtaaaataagatttaagagtaatttgacactcagtaaacaaaattgtttagcttaaaaatacagggataacatttctaaaatttaggaattattttgtaccataataatgctgaatttttcacactagttactgctagatatagtatttgtagctatgttagataaaatgttggcagatccttgactgaggcaagaccattggttattgaggaaatggtttgagattatatttgttgatcttaaatcattcaaaacgttgtgtccttaatttgtcatcaagctgcaaacaaggggaagatttttatctgttctacaggaatccactgatgatagcaactgcagaagtagtcagtcttttcttcttattccaagattaggaagtaaacatagaagttcatcacgtaaacttatttaggaattaaaaagaaaggaaataatatgtattcaggatgtactataccaggctataataagtcatctaataaaagctcagcctaccttttaagggtgtaggtggccctcagtcgcaaaaagctaaccaggtgccaaagcgagattcccattcaagcatgtgacaccagagcccttactgtcaacgacaaaaccacataaacctttcctttgactatgagggcataccataaaaatgaattggcataattcagtcttagagtcaaggaggagcacaattcctaggtggtggggttttgccatcttcaaaaaatgggaaaaaaaaatgttgaagaaaatgtggacttgatattagatgggagaccaaacaggagggaccagcattctgatcttagaggtactgcatgcagatttgatcagccatggggaaacaggtcagttggaaaacccctgaacttctctgcatctcagtactgcaataagaggggtgttaattattgtcaggcatggcaactttttgatgtctgtatctttaaaaagagaggtcttcatacttaatactgaaaacagttgaaattgcacccaaaaagccctaccagatatcctgaccacctgcattttatttcaaggtagctttgtaactgtcaaaatgtccttactgtacagaacactttcatatgtggaccaggactgcgagccgaatgagcacaccctatacctcagctagtcctagaattgtcctcagaggcattgaagagctgacctagttatattctgaaccctaacattttaagctacatcagatctggaatctttgggagttgagaccatcaaggagcttagagtagcttggcctctgaggaccttccatggtagccatgcgtttccccacatccatgccgccaccttgggagccaactggaacattcattctctgttaagtagaaggaatgttcacattcctttcactctcacgttcccccatgagcactggtaatgtgggttaaggttatcttaaaacagaatgtcttacgtctcaggaaccccttggtcctggacaaaccaagactgttggtcacatgagcttttgtgctcagagtaccaaggttaagatcttaggcaatgcctgggaccagtttttcccatagaaatatttaacttaaggacagtgttttccttgatgcacaatgatggctttagaagggatcttctatctgaaaaaccctgcccctctctgtggcttccacacctaggcctcttcattcatttcctgcttctgaaggcctctgagggatttaaaccaactgcagcctttctttacatctctgaacatggcttaaggtatgtatgtctttctgtgaaggaacaggagtagtctgaagactaataagctttttgagaggatttctcaaaaggaacgtgtgaatttttaaacatgggacccacacaggaaaatgggggagatgtggtaaccaccgatctctcttgtttataaatccatacagtcaaagtgggggccaaccccaattattccagaatgcccagtgtcagagttttcacttctggttacagaaggaaaccttacccactaaccttggcaacctttagagctgtgtgactcccagcccccgtctcacagcatcccctccttccccttaacatgaccctcatccatctttttaaaaattagataggaggttagagttcaggatgacaatcacatcctggtttacaggaaattgagacctcctgagaaatcatgtcaagctatgcaacagaaaagtaacagatgctttacaattggtgcctctgagcacattgagaaacaccaaccaagattcttttccttaatccgtagttgtacaaaggggcagtgagaggtcacactctgctggtgagcctgccgctgtgctaaaattgcctagaagtaagatgatcacattcttcgttgtctgtttggtctccaacttgaaactactgacaaacaggtaaatacatgatgacgatggctgccaccatgaactttgacaattttattctctttcctttagaccaacagctgactttatgctcaccaccaaacagccctcaagtactgcgatttgaaaatcaaagcagtgtatggtcagttattagaaacctgtgatgagaaactccagaagccattattaattccccagagaccccattcactttaagcaatctatgaggaaattatgttaaattcaagcatgactgtgcatttttacttaaatgtaaaacatatgcctgtattaaagaatccccaaattcccatgtgttcttaatgggtgtagtaaaatactagggtgtacttgtcagtccagatttgggctactggatttggaggcagtggtaatgtttagttattgcttggaatttttttatagatttatggggttacaagttaatttctgttacgtggatagcttacagatttttaatgggagagagaagaaataggtttatataaaaattgttttttaatataacaaaatttttataaagtgaatatttttaaagtacatttacataaagatgctaccttgctaggtactacaaaataaagactgtatgtattaaacccccaatatgtttgcaagcaatttgcacttgattttttttgtagattaagaggtcacagggtaagttgctgggtcagcacagtcaagggagaatcagaaatgggttctagttaagaagaatagaaattttgtcagagtgctattattattatttatggcaagagattgagagtgtgtcctctatttagggaagatgaatggggaactatgattccttctgaggcagagtctataaattatccctaatatccattctccttttcttccttttattataaatagaactattggaatttcagcagggcatgtggccaccccactagaaactaaattcctcaaccaccatgtgataggttgattacaaaaaatggtcccaatccttcccagtatctacatcctttgcagcttttctcatgggaaggtggagtctttgttccccaccacttggctggccttgtgacttgctttgaccaggagactctggaagttatcttgtgccagtttccagccttggcctccagaagtcttacacacttccccactttcttggattccttccatgccttgagagtaagccccaggctagcctactagaaggtatgagatcatgtggagaagaactgagacgatcctagaccaaccaatcctccagtacatgcaggaacccagccaagatcagagccacctactgtgtggctgatagcaggtgctgca

SEQ ID NO: 94425 - DNA, 39103 bp, Homo sapiens
accaaacagatcactatcatagaaaaaaagatccaaacaaattctggaactgaagaattcattgaattaaatacaaaacaaattcaaaagcttcaatgatacactagataaaaaaaaattaacaactacataacctgaagacaggtcttttgaaataactcagtccagaaaaaaataaaaaaataagaaacaataagcaaagcatatctgatatataaaacataagaaagcaaccaactattcaaattttgactatcccagaaggcaaaaaggaaacaaaagggatagaaaacctgtttaatgaaataatagctaaattcttctaaaatctatcaagagatttagatatctagatatacgaagttcagagacccctaggtagttacaatgcaaaatgttcttctccatggcacattgtattcagattgcttaaagtcaaagattaagagcaaattctaaaaacagtgagaaaaaagcatttagccatctataaaggagcccatcaacagtggatttgcaagcagaaaccttacaagccaggagaaaatgggatcatatattcattgagctgagttttcgctcgctctccaccactgctgaatgccgcctgcagacgtgccactgacttccacccgtccggatccagcatggtgtccactgatagaaaaaaactatctgcaagatactgtacccagaaaagttatactttgtaaatgaaaaggaaataaagtctttcccaaacaaataaaagctgagtaaatttatcatcactaaaccatacctacaagaaatgcttaaagggatcttacacatagaagcaaaaggaggatatctaccataaggaagcacacaaaatataaaacccattggtagagaaaacacacaaatgaggaagagaatagactcaaatggaagcacaacaacaacaaaaaacccaccaaactgttacaggagggtctttctttttagagctcccaagatggtgatgggccgctcccagatggggcaggccacttccaagatggcagcaagccttttgttctctgagctggggttcttggcctcatggattccaaggaattgaaccctgggccatgcagtgagtgttatagctctattagaagccatgggtcatggaagagaaccgtggaacccagtgactagtgttcagctcgattagaacaaacccaggcacttagccatggaagaacagtggtgagcctttagcctgattgggagcagcaatgggtgccttgctgggtcaggagtgcagcggacaccatgctggatctggaggggtggaagtcagtggcacatcggcaggcggcattcagcagtggtggacagcgagcaaaagctcagctcaagctggaacaaacatggaccagaagagtgtgcattggcaagatttaatagagtgaaaacagagctccaatacaaagagaggggacccaaagggggttgcccacccccggctccaatgcctggggtttatatcccaatcattgtccctctccctgtgctctcagatgatagatgatttgactatttctttacctcctacttttagcctaattggtattttagtgagccctctttactacctgattggtcaggtgtgagctgagttacaagacctttgtttaaaggtgggtgcagtcaccttccccagctaggcttaggaactcttagtcggcctaggaaatccagctagtcctgtctctcagtaccccctctcaacaggaaaacccaagtgctgttggggaggttggccaacaactgtactaacttctttctgctgaatgggggcataataggggtcatgcagttgagatttcctcaggagggatgtctttgatgtcatcaacattggagcatgggctaggaggcagatccaggggtctgccgtagatcttagccatggactgcacctggggctccgtttgaagaactatttgtagttttacagcttcaattctggaagagacaaacttaacaaggaggttaaagacacagggattgaaatgtctggcctgaagtgcaggggattatttctttggcacacttcacaggccctgactacctgcttgatagttttgaaaaggcctggtccagcaaataatgatttggccattggatgggtgctatcaacgcctaaatgaaaggtttggtgaagggttttaagtaatttccattggttagctgcaggcaaaagtatttttccttctttggtggctagacatcctgaggggagggaactatgtccttgtgaggtaccccattctatttcttctgctgagcactggggcttggtttcctggaggggattaccccatactagggttccttctataagcatttctaatggagggtcccgccttgtggctctttggcttcaatatctgcttggtggttcccttctatttccctttcctttcctttctgatgaccccagcagtgtaagatggccacctctttaggtttccgtacagcccataataactcataatggcttcctgatgtttaataggtgttccctcagaagttaggaattccatttctcaccatatttttgtgtaggcatggaggagaaggtaagcataattagagtgtttatatatatttacccttttcccttctcctaattctagtgtatcatggcccctgcttttgctaggatgtctctccctaacaaaggagtggggctttcaggcataattagaaaggcatgtgaaaagagtaaagtcccccagttacaacttagtggctgggcgaagtaactagtgactgcttgtcctaggacccctcggatagtaacagatctggaaatccagctagtcctgtctctcaaaactacaatgataaacaataagagaaaaagaaaggaagaaaggatatacatacataaagaagccaactaataatatgacaggattaagctctcacatatcaataataaccttgaattaaatggattaaactttccacttaaaagaaagagactggctgaatggatttaaaaagcatgacccagctatatgctgcctacaagaaacacatctcaccaggaaagacatatatagtgaaagtaaagaaatgagaaaagatattccatgcaaataaaaaccaaaagtgagcagcaatacctatgtttataaaggaaacagactttaagtcaaaaactgtaaaaagagacaaagaaggtcaatacataatgataaaaggatcaatcgagcaaaggatccatgaggaaattcctgcctaataaattttggtcagaccggttgtctgctctcaaaccttgtctcctgataagatgttatcaatgacaatgcttgcccgaaacttcattgcaattttaatttcaccccggtcctgtggtcctgtgatctcgccctgcctccatttgccttgttatatcttattaccttgtgaagcatgtgatctctgtgacctacaccctattcgtacactccctccccttttgaaaatcactaataaaaactttctggttttacggctcagggggcatcatggaacctgccgacatgtgatgtctcccccggacccccagctttaaaatttctctcttttgtgctctgtccctttatttctcaggctggccgacacttagggagaacagaaaagaacctacgtggaatattgggggtgaattttgcccgatayctggctgaatttcccctgataatgccactctctatgtccatgtgtacacattgtttagcacccacttatgaatgagaacatgtgatattcactttctgtgcctggcttgtttcacttaagataatcccctccagttgtatccatgttgctataaaagacattattttattcctttttatggctaaatagtattcaatggtgtatatataccacattttatttaaccattcatctgttgattccctatttttgctattgtaaatagcatttggaccacatttcaagtacttaattagtggccacatgcagcaagtgactatcacattggacaatgtagccccaacccactgtatgaccttgggtaagacttgcaaactgtcattgcttcaatatctccatctataaaatggggatggcaacaatacctcactaagagtgtaaagactgagttactgtgtgtaaagcacttcacgcctccccatcggtgcttcaccctggggctgcaatgagcacccaatcttagtgtcagatgacacagcacagcaagaccgaggcccttggttcaggaaagtccatgctgccacctcttcagggtcaggaaagtacagtttccacctcttacaaataggactgtttgtctgctcctcctgggtcaaagtaacttcgggttcaggtcctggatccagcaaagggtttgcttaacattgcaagaaagatgttgcctcatggtcaaaagtcaggcgtaggatgagacaggcagacacgcacacattcacacccacgttttgcaaagatggactgaccctgtcagaggatgtgtgggtgaaggtgcacagtgaggatagagacatatgggagtccagtagacatcaatcaaactggactcagtttgcacacacctggagctcaagagtctccagggggaaaacagagacacaaagtcagacagagagagagccagagaaatttcctgcaccgtgaagatagtcagaggcagggaagaaactccttagcactagttagagtgatcagaaaccaagaggacctgatcgctgtacctgccaggtctcagtttctgtctccttccaactgaccacctcttcctctgagactcaccagttctgcatctcttgctcctccttctgtttctccgaccacttccacctgtggctgtcacagaagggcggatgaaggaggggacactggagatagactcagcatctgcaggcttccaaagagaggggctaggagatccaccaacacaccagcacaaatacaccagcacacacagatacacacaattggttcatgtattgctaggttacagtttgctatgctacaaaggcagtaggccaaatttgattgaattgaataattccttattttcatcagcttctcctttttttttttttttttttttttttgagatggagtattgctgtgtcacccaggctggagtgcagtggtgtaatcttggctcactgcagcctccacctcccaggttcaagtgattctcttgcctcagcctcccgagtagctgggattaaaagtacccaccatcacgcccggttaatttttgtgtttttagtacagatggggttttgccatgtgggccaggatggtctcgaactcttgacctcaattgatctgcccccctcagcttcccaacgtgctgggattacaggtgtgagccaccgcacccagccagcctctcagttttgaacatgcactaccaccacctccacaacacacaaatgtaaatgcactttcgtatataaaactgtataaatacaaggaagctcatacacatgcaaggatacacacataagcacccccagattcaaccacagaaatatacgccagtacatttgcataaattcaaacacccctttacatgtaaaaatcatataagcacatacagggatgcaagcaggcatggacaaatgcatgcaagcacagacaaacagacaaagctaagtaaaaaagtgcaagctcacctatgcttacaaaaatagacatacatatacccacaaacccacacacccacacattcacttgctcacctggactttgatatctctaccactgtatccctgccaatatctacagagtgggtaaagggataggcatcaggtcactgggttgcccaagcaggaagtctgggttccctaacaactttttctaagctaatgctcctggatgatgatgaaaaaggaggtggggaatggatgaaattttataacagggtgcagaggcagggtcaggataaaaggcccagttggaggctgcagcagggtgcagggcagtcagaccaggaccatggaactcagcgtcctcctcttccttgcactcctcacaggactcttgctactcctggttcwgygccaccctaacacccatgacmgcctcccaccagggccccgccctctgccccttttgggaaaccttctgcagatggatagaagaggcctactcaaatcctttctgagggtaagacacagacgaatggggtctgagggtgagctgcttcttgccttggtacttggggaagcttcaccaaacagaatgaggcagacttccagagtcaggggtggcacgggcatggttggtgagtacggagcatggtgaagcatgatgggtggtattattaggagaaaagcatcaaattaaatttagcagagtttatttgagcaaagaagtgactcatgagttggacagctccctaaaccaggaaagacaccacacggcagtatggtcaagtggtatttacaggcagaaaaaggaggtgacatacagaaacagcctgattggccacagatcacagcttgccttacttggtcacaatctgagcagtttgcagcctgtgtggactgaaagcccagctgctctgattagccaacacttggctacttgtcacaagaatatattcatttgggccaggtgcagtggctcatgcctgtaatcccagtgcttttggaggccgaggtggtggatcacctgaggtcaggagttcgagaccagcctggccaacatggtgaaaccttgtctctactaaaaatacaaatattagctgggcatagtgatgcgtgcctgtaatctcagctayccaggaggctgaggaaggagaatcacttgaatccaggaggcagaggttgcagtgagccaaaatcttaccactgcactccatcctgggtgacagagtgagactccttctcaaaaaaaaaaaaaaaaaaaagaatatactcccaagttaggttgcagttcactctacagagagagctttaggtcaaatttaatttaattaaacaattctccccttttggtcagcctcaaaattttgagattgaccaaaaccttgggcatcaacattacttctgtcaccatcataatggacttgtctgctctcagtatggaattcacaatggacaatgtcaacgtagttgagtgattctttacmttttcttcatgtttttgttgttcccactgtaatgagcccactggatgtacaaagaatggctgcatatgagcatttaagactctttttttttctgagacagggcctcactctgtcagccaggctgaagtgctgtggcatgatcacgtctcactgcagccttgacctcccaaggctcaagtgatcctcctgcctcagccccccaagtagctggaactacaggtgcatgccaccacgcccagctaatttttgtattttttgtagagacagggttttgccatgttgcccagactggtcttaaactcctgggctcaagcaatccacctgcctcggcctcccaaagtgctaggattacatgtgtgagccaccgcacccggccaagactctygagaaaatacaacacatcagggagactgttatgatggctctcaggagggtaatacgaagaaaatgaagtcactgggcctgtaataaactttgaggaatgtggacttgggggtatagataaggtccactgtccacagagagaagaaaggctgttaatagtctcttttaacttgagtgtgtccatgaaccaaactgatcaaaatcgaataattcgaagttcagacaataaagatagttcaatagtattagagtccaattggtcatagattttgttcagggcatgatggtaattaaggaccagagcttgctataaaataacttgatttatagagacattcatttgtagttggcctggtaacatatagtatcctggagacccactagaagaaacattaagagtagaaaagtttgggatagccaggcttgctgtgttagtccattctcacactgttataaagacatacctgagactgggtaatttataaacaaaagggatgtaactgactcacagttccacatggctggggaggccccaggaaaatacaattcatggcaaaaggtgaatgagaagcaggaaacttacaatcatgatggaaggtgaaggagaagcaagtaccttcttcacaaggtggcaggaaaaagagagagagccaagggggaagagcctcttataaaaccatcagatcttgtgagaactcactcactatcacaagaacagcatgggggaaaccgcccccaggatccagttacctcctactaggtccttccctccacacctggggattacaattcaagatgagatttgggtgaggacacagagccaaaccatatcacttaccatcaccattcaggatgcttgcaaaccaactgctagctgcacctgtaaacacatatctgtttctttcccctgagaaatgtccttagtgtatttgtggcagtgtctagagaaacagcagtgtcagccgcattttaaattaagttatctgcactagtgaattcactggaaagataagagcaatatttggttttcttcagcaccatacacaagcctccaagatgggcatagaggagatctaaaattgcgtgatgttccattaagcgtttttgttgccacaaatgttctcatctcagtttggagagtggcttctacccatctgaactccttggaggttcaattagctgcaaaattcaagatgtcccttaatgtataacttagcctcagattccatacaactgtcacccaaataccaccaagartgagcacccaggaacccaactggaaccttttctgaacagaaaccaacttatcttcgtcgattttgagrttgatagtaatttcagttattgactgttttggcttttaactatgggaggtattaggaaactctcagggaaacaatttggaaagcagcagtgagctaggccaaatagcaagttctggacctgtgaggagaaagaacagagtaagcaaacctcaagayactcaaggtaggcactcgtggtgttggaaaagagggtcacctactggcattagagcagagatcagttagatttgtttacccataagtctgcatagctcctgaacaaggtgggaaacttacttttttgtggtctttttctagcatgctgcgaaggtgcataaccacatttagttggaaagagactttactgtatttacttatttatttgtttttaatagagttggggtcgtgctatgttgaactcttggcctcaagcaatcctcccatctcaatctcccaaagtgctgggattacaagcatgagccaccatgcctggccactttacatatttaatccagtaacattacacacgcaattgcccacacccccataggtagtcyccaggtcttgcatacgggatgcctggaagcaaaatatgccttttgcagccattattcagatacatttcctatatttagtagtgattatgttattagctagttaatagtatgttattacgtactgttattatattaactaactaataacataatcactactaaatatttccagtgagtgcaaaaaagcaagtggcaatgatgtctagaatatcaagatatagctttccactcctcctttggggtttctgggtgattctcattgggaacatgaagaggcattggcaccagtgaaattatttcctgattttggggcgttggttcagaaactcaacaactccttgttttttttgtttgtttgcttgttttgctagagtataagcctttgctaaagccattcacagattatagtcctatggattttcttgtaaggaaagggaaagggttaggacagcaagaaatggggaagaaaggataaaagataatgctttcatgatggaagagaaatcttgatccacaatcttggaaaagctgtccgcatataagatgccaactgcttctggggaaaaacttccctggtcagctttgccttaaggtctccaacagacatacagttctaggagtctagaagggtcctttccaatggagagatgtggatccaagatccgagaccctgacattttgctacagagaagaacttggcattgtccttcccaatggagtacaaggaacagtcttagaagaacttggtacggtctcttccaatggagttcaaggacagtttgtctggtgtcatttccaaagggcccaacctctaaattctagatcatgaaaggtctggttgtcatcaaccgatgtgtcatcaatgactcattttacctggtgaaaacatgctttggcataaagtattatagccttgcattattgagtcatatcagagtttataagagtgggagatacatgagattctattattaggggcataggccctctattactattttacaagagatctatctatgtctttccagtaggagtggatctgattgccatcaatcaataatacctkwgaccaagggactccaatcaattcagcatgctttgcctaatgatatttgtttgtaayactgttgcgggacaatcaaagactggagagaccaaaaaaggttcaggagagtttattaaattaaggtgatcaccggttcagccagacatacatccagaaagtctgagccccgaacaaaggcttttcctacttttaaacatattaaggtgggaactacatgaggcaggaagccagtttcagaagtgagaaacaaagcagttaaataacatttcttacatcttgagaaagacatgtcttgcaacctaaccttatcggtccggtgaccctgcagctgtgcaggaactcactgggcctgtaataaactttgagggatgtggagttggggagtataggtaaggtccactgtccacagagagaagacaggctgttaatattctcttttaacttgaatgtaaggtgtggtcatactttgcagcaaccttaagaggattttaaaatttatattactactactattaggttatagttgatttcattaattccttcttcaataccttatttaactgttttaccacttgtctagtgaaacaagtacctctgtcactggagagttctccaggaatgcccagtaaggaaatacattttctaataaccttttatctacggttatggcattgattgatctttgtgcatagaaatgctttaatacaaccagaaaacatgcaatgaagctggcagttgaattaactccagcttcaagtgttcaaatgatctaccaagtgccagaaatatatcacctgaggtttttgttgtcttactagaattatggatttgataaaccaaatattagttataaaccatttagyaatcttagaatagtcacctcatcaatattttttcactgtttggatcattttctctcttctatgatgagtcatggaatacrgagcttttagtaatggaaattttaagaactcaggaaggaccaggcggccatctagggtctccatgagtgcatgcttcacattggaattacagactctaaagtacaaattttaatacaatgagttgcaatttatgcttctctaattcaggtacataacactggtttattaaataggttatcataggtaatttgatggtgccattgcactccagcctgggtaacagattgagamcctgtctctgaattggaactgcacgggggcactgtccttggaggggtgaatgggcatgaagaggtgtctgggtatgagccacaggtatagaatttcactcttctctgccatcctctgttacatcctgggtacctgyctgccactgaaagaatgaggtaaaagaggtggtggcacgaatcaaatagatyttgctgtgccaatgagagagagcagactagcccatgtcagtgccaggagagtggaggagagagggagagcaggagaggagtgtgggtagggagtgctcatcaacagtacacatagtgccctataccggtaactgccactggctcagtatttacctgggttatcactgcttaccatgcctgattttatgattaattatctacttatcattactaatccatcaacccactttccaatgggagaattagaacactgacaataccttccagctcctcttccccttccccctcccatgttgaccatactcctgaatcttaggctcgttatccttttactattaatagagttatttttttaatttctgatcaatggtctttttaatgataccaagtacagagtatatatgccaatactactatgaatttttaaattatttgctcagacagaatacatggacatacaaatgatgaatgtgataattgtcatacatatatatttatcttagacacttagtcaaaacatgtggtctttggttatcagttagacactgtcactttacctggaagatacaaggtaattggtcacagactctcaaattatgaaacatttagatttttcaggggaatgacatggagggagccaaggagtcttatgattagataagatgttgtttgggtggctcacgacaccactgggcaacactcaaagaggtggtggcttatacctgtaatcccaacactttgggaggctgaggtgggaggatcgcttgaagccaggagttagaaaccagcctgggcaaccaaacaagacctggctctacaaaaaagttttaaaaatttagccaggcatggtggcatgtgcctgtagtcccagctacttgggagactgaggcaggaggatgacttgagccttgtagtttgaggctgcagtgagctatgatcacgtcactgccctccagcctgggcacagagcaagaccctgtctcttaaaaaaaaatcatctgcaatgtgaggagtgataacatttaggaacgtgtgtataggtttaaatgctggtcaaagacatcctacacaattcgctgaaccttctctctaagggttttttcccaagctctgcagacgctatctgggcacaaatcatgcctctgttaacagaatttgctgttccttctagctcttggtatcccactgcccgctttctttatgaaagctggtatggtcattgaatatcccaatcctttacaaatttggaaacaagcaaaactgtcaatgaaatttgtatttgcctaaaatgagttttctttctttcttttttattattattatactttaagttttagggtacatgtgcacattgtgcaggttagttacatacgtatacatgtgccatgctggtgcgctgcacccactaactcgtcatctagcattaggtatatctcccaatgctatccctcccccctccccccaccccacaacagtccccagagtgtgatgtttcccttcctgtgtccatgtgatctcattgttcaattcccacctatgagtgagaatatgtggtgtttggtttttttgttcttgcgatagtttactgagaatgatgatttccaatttcatccatgtccctacaaaggacatgaactcatcattttttatggctgcatagtattccatggtgtatatgtgccacattttcttaatccagtctatcattgttggacatttgggttggttccaagtctttgctattgtgaataatgccgcaataaacatacrtgtgcatgtgtctttatagcagcatgatttatagtcctttgggtatatacccagtaatgggatggctgggtcaaatggtatttctagttctagatccctgaggaatcgccacactgacttccacaatggttgaactagtttacagtcccaccaacagtgtaaaagtgttcctatttctccacatcttctccagcacctgttgtttcctgactttttaatgattgccattctaactggtgtgagatggtatctcattgtggttttgatttgcatttctctgatggccattgatgttgagcattttttcatgtgttttttggctgcataaatgtcttcttttgaaaagtgtctgttcatgtctttcgcccactttttgatggggttgtttttttcttgtaaatttgtttgagttcattgtagattctggatattagccctttgtcagwtgagtaggttgcgaaaattttctcccattttgtaggttgcctgttcactctgatggtagtttcttttgctgtgcagaagctctttagtttaattagatcccatttgtcaattttgtcttttgttgccattggttttggttttttagacatgaagtccttgcccatgcctatgtcctgaatggtaatgcctaggttttcttctagggtttttatggttttaggtctaacgtttaagtctttaatccatcttgaattgattttgtatactaaaatgagttttcaaaaggwtctttgtggctaccttattagttcatagaaagtggaggcttgtctggaatgatattaaagaatttttttcattttaattgttttagagacagggtctcagtctgttacccaggctggagtacaatgrcacagtcatagctcactgcagccttgaactcctgtgctcaggagattctcccacyttagcctccagagtagctgggactaaaagtgtgagccaccatgccccactatttatttttgtagagatgtgtttgggggacggtctcactatgttgcctaggctggtctcgaactcctggactcaagcaatcctcctgcctcaacctcccaaagcattgggataagttttgcatagacatgtttgaccctctcccttcctttattgcagcaaagatttccattttctcacagggaggacttggggcaaattgtttttgtcgttgttattgttatttgaggatgtgggtgggtcatcttggttaatgtcagtgcaagaacggtgtctgctcctcattattggggttccttagctattcaggcaggcagcagctcccttgagaagacttcctgacccccaggtccccatcatatgctctcatacaccagctgcccctccttactgagcctatgtccttgatagtgctgcatttacctgtgatccygtggctgagctctccctcacacttccagacaaggaaggcctgtgaggtatcagcacagtgctgaacatagtacctggtacacaataggcatttagtaaatatgtgaacaggaacaaatgaaggagtcagtgagtgaaagctccaagcctgactcagcggaactggcagtcggccagggcctacaaagtgctgcctggccctcagtagggggtggcagatctggggatccctcttcaccaaatagagttgcatcatacaggtaaaggtcccaagtgcctattgttttcttttcatcattttccatgtgtgacaagagtatcacgcaatcatgtgaatcaatggacttagttttctcactagactaatgtgtctaggaattatctgtgttgtcatggggattttccaggtgtcatttacaactacctgtggacaagatgaggtgctaccctcatcttagaattagggatggtggcygggcatggcagcccatgcctataatctcagcactttgggaggctgaagcaggtggatcaactgaggtcgggagttcgagaccaacctgaccaacatggagaaaccctgtctgtactaaaaaacacaaaactagctgggcatggtggcacatgtctgtaatcccagctactcgggaggctgaggcaggagaattgcttgaacccaggaggcggagtttgccctgagctgagattgcatcattgcactccatcatgggcaacaaaagtgaaactccatctcaaaaaaaamccaaacagaarcaaacaaacaaacaaaattagtgatagtgatgctcagcctggggaaagcatttgtccagtggcacacaactgggaaaaggggaagctgagatccagcaggaggtctgtctccaaagccctcctagactaaagctgcttaacaatttgtggattatgaaattctcatagagtttgattaaagctgtggccccctcttttccaaataggcacatacatgtttgcataaagttgtgaggcttcacacactccctaaaactctttcataaaccttccaaggatcctctaggtattcacgaccatctattatgattgcatctcttgggggtggggtaaagagggagggcatgagcaagtgtgcatcagggctgaggaaggtggcgctgttgcttctccatttcccaataagcttccagattctttttgatgtcagagggatgtgggctcgtgtctcagattcaacccgtatgcattgagtcacagttttctcttccgtcagttaagatcatgacaatgagaatgtgtgcccctaaggtggttgtgargattaaatgggatattgcatacagctagtatataataagtgctcattaaatggcaactaccttgatccactcattcatttattcacgaatccaataacaattcactgggcactttctatgtaccaggaaatagtctaggaattgatgatgtggcatcttggacaagacatacgaggtcactgcgcttatggacattccattggcagagacagataagcaaaaaataaacagataaggaaatgttaggtggagaagagctacaattaaactaaagcagggggatatttcagacagtgatgagaactacgttagattgagtggttaggggaagactgtcttgttttttttttctgagcagagacaatgaaagattcaggtggaaggcactagaaggaggcaggggtggctacaagaatcctgaaacaggaaaaatgtcagagaacaacatggaggaatgagtgggaggagaagtcagagcggtaatagggccacgtcatgtaggaccatgtgaaccmtcagtggagacttcagatcttattctcagcaaagtgggaatattgtaggccttggtgagcacgtggatattaattattttacattttagtggggttaccctggcttgtggggcagtgaaacaattgttaagtggagtaagcatgtcatccagaagtccagtgaaggggctttgcagagatcaatgcagggcatttgtaagtaaacttaacaaattttatgacttttatgtcaagtttttattgaacttgaacatcactgtaaaaagcgcacagctcaatgaattttcacaaactgaacatactcatgtaattgacatgcaggccaagtagcaagaatgccccgaaaccctgcaccctgttcttttctattcactatccacctaccatcttgatcatgggttgattttatctgtgtatgaacytcttttttgtttttgtttgtttgttcctgagattgaattttgctctgtcgcccaggctggagtgcagtggcactatctcgcctcactgcaacctccgcctccccgggctcaagcaattctctcgtctcagcctcccgagtagctgggactacaggtgagagccaccatgcctggctaatttttgtatttttagtagagatgggttttcaccatgttggtcaggctggactcaaactcctgacctcgtgatcagcctgcctcagcctcccaaattgctgggattacagatgtgagtcaccacrcctggccctgtgtttgaacttcatacacataaaattatgatgcattgactcttttgtgcctagttgcttccactcaacattatgcctgtgagtttcagccacgttgtcgcctgtagctgtggtttgttcttttttgttgctgtatactagtctattgtgagaaccctcactgattgtctatatctatattgatgagcattttattaagaaagcttctgtgaatattttgttcattttttggtgaacacacatacacatttttgctgggcatgtacctgggagtgaagtrgctggtttcctgggtatccatttgttcagcttcaggaaatactgcccagcagttccccaagtggctgcacagtaatcccaccttatccactggagatatcttctgagacccccagtggatgcctgaaaccccacataatactgagcactatgcatactctttttttttcctatacaatcacattatatagggagggtggtatacacagtgcagacatggtggacaaaggatgattcgtgtccggggtgggacagagtggatggtgagagatatcatcatcctactcagaatgatgcacaacttaaaacttacgaattctttatttctggaattttccatttaatattttcagactgcgattagctgcaggtaactgaaactgcaaaaagcaaaaccacagatcataagaagtatgcggtgggggtgatattcatcgtattttatcaaccatctttactgtttagggcacaagccaatcagagcagaccctggctgggccacccattaacctaagcttgtccaacctgccttattttgttgttgttctgttttgttttgttttagctttttagcagcctgaagccatggttttcagtttctgtctccagtgatacacagaaaggaaggatgaggaaggggctttactggcccaaccagaaacggaaactaagaacccatgactgtattctctcccttggacagcgttaaccattaacccttaattgctgggtcccagcaggggaaagggcagcctggggaggcggatgttggggaggggctaattaccaatctggtatgtaagtattttgatagttttacaaatgaggtgtatgctgactaacagccacccctggtgtggatgtgattggcagttccgagagaaatatggggacgtcttcacggtacacctgggaccsaggcccgtggtcatgctgtgtggagtagaggccatacgggaggcccttgtggacaaggctgaggccttctctggccggggaaaaatcgccatggtcgacccattcttccggggatatggtgagagcctcagaggcactgggagggggcgggtggggggtgcatcagggaagggagtwtatgggaggaagaaggactcagagccttcttccaacttcttctacaaccaacccacacctcccctgcaccccaggtgtgatctttgccaatggaaaccgctggaaggtgcttcggcgattctctgtgaccactatgagggacttcgggatgggaaagcggagtgtggaggagcggattcaggaggaggctcagtgtctgatagaggagcttcggaaatccaagggtgagtcctgggggatgaataggaaagaaagacaatgaaacactgagagatgcaggtgcacgggaatagaaagacagagaggtatataagggcacagacagagacagacgaaactggagacaccatcagacagagggatagagacagagagggagagagacaggggaatagagagggatggggatgggcaggagagaaacacagagagccagggaaagagagagatgccaggtgtataatgtccaagagttactcaaagaggctggatgtgatgactctcacctrtaatcccagtactttgggaagctcargcaggaggattgcttgaggccaagagttggagaacagcctgggcaacataatgagatcctgtctctacacaatatagaaaagaagtgagccacgcatggtggtgtgtgcctgtagtcccagctactcaggaggctaaggtgggactacaggatcacttgagcccaggaggttgaggttgcagtgagctgtgattgtaccactgcactccagcctggacaacagagcaagatcctgtctcaaacaaacaaacaaaccctcaaagacatataatttcatggatcaattgtgtctgtcaaagtcaaaaacggaagttaagtaaaagaaaaaaactacagacatttaacaaataatgaactgtgttttccttgccctgggtgaagtgctgatgagctggcagtgagcagacaggccaggtggggtgttctgcccgggtgcagctggaggggtcatcaaagaatcactaggttatttttgagttctccataacttggtgtctgtgagacatgtaggtgaagggtctctggctagcacctccatctcattcatgccaggtgtttaccatctctcttatcaaaatttctcaagagactctgggatgtaaatgcagaggctgcatggggaggtagagacccaggagctatagggaaacggggacaagaagactgaagagaaggacaggaagaaacagtgacacaggcaggaggaaagagacagatggagggaccaaaacaaaaaaatataggttgggtatggggctcatgcctgtaatcccagcactttgggaggctgaggctggcggatcatttgaggccagcagttcaaaaccagcctggccaacatggtgaaaccccatctgtgctaaaaatacaaaaattagccaggcttggtagcacgtgcctttaatcccagctactcaggaggctgagacaggagaattgattgagcctgggaaatggaggttgccgtgagctaagatcacactactgcactccagtctgcatgatagagtgagactctgtctccaaaaataataataataataataaaataaagaacggcaggggggagacaaatatacacacagagagacagaaagaaacaaaggcaaagagaaattgaggcagagaaaattagagagasagacagacaaagcttaggaaaaggtctgcagaggaatgagagaagacaggcaagtgagaaccagagagaggctgcactaacctgatgttcttgggtccttacagaccactctccctccagctggggccagtgctgagcctggtgtatacaggtatcacttaacaagtacagaataattcccagaagactggagagccctagatgtggaaagaagagattaagggggagtaataggtaggggtggaaagatggttttttatttgttttaaattagagacggggtctcactctgtacccaggctggagtgcagtggcacgatcatagctcactgcagcctcaaactcctgggcccatgtgatcctcccacttcagcccctggactatttcaactgggactacaggcatgtgccaccatgtctagctacattttttttttttttttttttgtagagacagggtctccttatgttgcccaggctggtcttgaattcctgatccttttgaatcaggctcccgaagtgctgggtttagaggtatgggcccctgtgcccacccagggctttttaatttatayaagcaattgattgaacacctactctgcccagcccctacccctgggatttaactgtactcactcccagagtcagaggtggggcctgagaggaggtgcagagtgagaaccggctgcatggactctatagctgtgttgcctgggtctaaatcctggcctcagtaatgagtagctgtgcaactttggtcaaattactcagcctctcggtctgcccatctataaactggagctaataatcaaattgcatctgcctcacattgttgtagtgagagttcaatggaattacgcgtgacgtgctggtacataattagctgttayggttattctcatgtttaccattactgagtgatggcagacaatcacacagagatrggtgacagcctgatgttccccaggcacttcagtctgtgtcsttgayctgctgcttcttcctaggggccctcatggacsccaccttcctcttccaktccattaccgccaacatcatctgctccatcrtctttggaaaacgattccactaccaagatcaagagttcctgaagatgctgaacttgttctaccagactttttcactcatcagctctgtattcggccaggtcagggagacggagagggacagggggtgtgggggtgaggtgaacacccagaacacacgagaaaaggatgacctgtcttgggggctcagaaatgcagcttatccttggaagaaacgcagacatgtgaagaatcagggacatggagacctggagggaggagagacggtgagacagggatagagacactgagagagagaatgaggcgtgatggggaggcagaaatagagtcagagagagactgagagaaggaagatgagcaaaaacaagacaaagaagagcagaaatcaagagattctgagagacagagttgatgagaatgagtgtgaaagagagggagagagagagaacgaataaggctttgggcttcatgtctattctgctcctggatgtcatttctgttttattttttttagacggagtctcgctgtttcattccagctggggtgtagtgttgccatcttggcttactgcaacctccacctcccgggttcaagtgattctcctgcctcagcctcccaagtagctgggactgcaggcatgtgccaccacacctggctaatttttttttttttcttttcgagacagagcctcgctctgttgcctaggctggagtgcagtggcacaatctcagctcactgcaacytccacctccctggttcaagcaattcccctgcctcagcctcctgtagctgggattacaggcgcctgccgctatgccaggctaatgtttttgtatttttagtagagacggggtttcgccatgttggccaggctggtctctaactcctgacctcaagtgatctgcccgcctcagactcctaaagtgctggaattacaggtgtgagccaccatgcccagactgcttctggttcttctgtatccttgcttctcagtctttggtaaagctctccacctaaagaaaatgaaggataaatgacaataaggaacagcatttcttcattttctcccatttctccttctccctctgtgtttttttttttaactttccccagattgtaaaggcagtcttctgctcttttaaaacaaaatactaaaatgtctccttattkattaacctggaaatatgcctattacatattaaatttaagaatatcaagctgcagaacagtatgcatagctgtagtttgttgttgttgttgttttcagacagtatcttgctctgttactcaggctggagtgcagtagtgtgatctcaactccctgccacctccacctcccaggttcaagcaattctcatggctcagcctcccgagcagccgggactataggcgagcgccaccacacccagctaatttttttgtatttttagtagagatggtgtttcaccatgtcggccaggctggtcaacatagctacagctcttaagcaggggtgtatgttggattcacatgtggggttgtcacagttatggattttcaggaccctactttctgggcggtctgatctggaaagtctgggatggggcccaaggtgagtacttgtaacaagcccgaccagtaattctaatgttctcctcccaccgagaaccacagagaaaagtctggaaggagacccaccagacagttaacaatggttatctctagaaggagagattaagaaggaaatttacatctgactatatatgtttgcatttttgcaattatttgcaataaattaggcattccattcttcatcaaagtaatagaaataacctccaaaatacrtagtcctaacatgtcagcaggcttatcttgtgtaagaatcattttattaatatctgacacagcaagggagatgaggagaggtgggaagagggagagaaaagtatgagaaagacaaataaacaggctgaggtagacaatgggtgacacagaaaggaagtgagacagagactaagagagatagaaaggagagaggcagggagatggggcagaggccaagaaaaagacagaaggatgagggaggaagatgcagaaagaggtaaatgtgagatagatcaaaggagatatagagtcagtgagtgaggggttcagaggcagaggggagtggggaagtggggttcccatggagggattggggcccaggaggcgctctctccctgtgacctgctagctcagccctaggcaaacctcaccaccccttctttcttgcagctgtttgagctcttctctggcttcttgaaatactttcctggggcacacaggcaagtttacaaaaacctgcaggaaatcaatgcttacattggccacagtgtggagaagcaccgtgaaaccctggaccccagcgcccccaaggacctcatcgacacctacctgctccacatggaaaaagtggggtctgggagaggaaaaagggaagggaggggagggagggcaagatggagaggtgagaagagggagggaaaaggggtagggaaggggaagatggggagggaagaagaaagactagggaggggagaatagggaaagggaggagagaacatgaggaaggaaagaaagatgaggtgaaaggarggagaaaatagggaggaggaactgagacagggagagaggggaggtgggaagacagaatgaaagacagagggagagagagagaagactggctgaggaaggaattcggggcaagggacaaaaatacagcaacaagagaaaaaactcacagaggcagaaagagacggggacaaaaagagagaaacacatcaaagagatgtggagagagatagaaacagagtyaggaagactaaagagaggctgagagagatgagttagagatacgcggttggatgtgtagaggacagagaaaagcaaactgggccagatagtgtcaaagacctttaggccaacggagggcagccagggagatgggcrtatacacagcaaggctacagcctcccctgaccctccccttccttccctactgtggacgcaggagaaatccaacgcacacagtgaattcagccaccagaacctcaacctcaacacgctctcgctcttctttgctggcactgagaccaccagcaccactctccgctacggcttcctgctcatgctcaaataccctcatgttgcaggtgggccagggacagccagtcaagggggtcttctgacctccttctgagctgcagaaatggggctatgggtaccacctggatgagagaggggatgctggcttcctattctgggagcactgtaggctctgggctagattccaaycaagccaattctgttggtggatgcatggatgcatgaagaatctgtccatgcgttctcccactgttttcttccatcacttaaggattttttgttctaaggtttttgtttgtttgtttgttttttgttttttggtttttttttttttgtcttttttgagacagagtctcgctctgtcacccaggctggagtgcagtggcatgctcttggcttactgcaagcttcacttccagggttcacgccattctcctgcctcagcttcccgagtagctggaactacaggcgcctgccaccacacccggctaattttttgtgtttttagtagagatggggtttaaccatgttagccaggatggtctcgatctcctgacctcatgatgtacaaatttagggggtacatatgcagttttgttacatgcgtaggttttgtaatggtcaagtttgggctgttagggtatttatcacccaaacagtgtacattgtacccattaagtaatttctcatcattcaccccccttctgctccctcactcttctgagtctycactgtgtatcattcctctctctgtgtccatgtgtacacattttgtagcactcactcatgagtgagaacatgcaatatttgactttctgtgccatcacttaaaaatcgatccatccacttatcatttcatctattcattctttaattcattaattaaagaatgtataattactgattctttcatttatgattcatctaaggacatatactgtcattcatttatktggattacttgatccacaagttgatcctttgaaacagtggtatgttgatggactatttgtcattgattcattggctcattcattcattcattcatgcattcatccatccttctacgaactaggtttcactcttatccttccatgagtcaacctttcaattcacccttaatccatccgtgatttccttcatttatcacaataattcactcatttattcacctctgatctacttatcattcaatccagcctttcatttactcctttatttactcatacttcactaatttaattattcacttgctcttccataaatctagccattcatgtgattattcattaattgggttcattgatttctttgtctatggatcattcattagtgattaattaatcaatccatctattaattgataagtaaatacagacatccatttattggtttgttcatttattcatcaatctttccatccatgaattgatctattgattgattgattgatgtttttatccagttgttcatgaattcmtctattgttctattacactgttatatacctgaggaccaagaatagtgtctcaactatattataaacacaataaatattagttcattttctactcatcttagagagggtgttttgagaggtttgtagcctggagttcttaatctgaaattccatgcaaaatcgtggtgtgtgtgtgcatgtgtgtgtgtgtacctgggcatgtgggaagaggatccgtaatattcattagatttcaagcagtgagaattcttgttgcttcctccctcctcccctcaccccatgctgattactttgaggggtatcaaggatctaaccctttactataggtttttcattggtcaatagaaagtagtgtccttgctgaaaggtctctttttaaaaaaatttttttttcttttgagatggagtcttgctctgtcacccagtctagagtgcagtggcatgatctcggctcactgcaacctccacctcctgggttcaagtgattctcctgcctcagcctcctgagtagctaggaatacaggtgtgcaccaccacacccagctaattttttgtatttttaggagagacgggattttgccatgttggccaggctcatcttgaaytcctgacctcaaggaatccacccacctcaacctccaaaattgctgggattacaggcatgagccaccatgcctggcctgaaatgcctctttaaaatgagattcattggtcttcttttctgtacagagagagtctacagggagattgaacaggtgattggcccacatcgccctccagagcttcatgaccgagccaaaatgccatacacagaggcagtcatctatgagattcagagattttccgaccttctccccatgggtgtgccccacattgtcacccaacacaccagcttccgagggtacatcatccccaaggtaagaccggctggaaccccatagccctcctgtttgggcatcctggattctcttaatccccgaactcaaccttttgttagctccttaattgagtcccgttgtttttgttttttgtatttcttttttgtggagtgtgtggagggttggagggaatggcaatatcttttgatcttgtgatcctccctcaggacacagaagtatttctcatcctgagcactgctctccatgacccacactactttgaaaaaccagacgccttcaatcctgaccactttctggatgccaatggggcactgaaaaagactgaagcttttatccccttctccttaggtaagctggacccacaatttctttcccagacaccagagggcaggtactatccycaacttgagaaaaacaacgagagatactgattatttgagcacttaatatattctgattgcttcacctgccttatcccattccatcttcactacaaccctataaggaggcttgagaaagaagattacattcccaaaggcacatcttggcaagcaggaccttgggcaagtattttaacatctctaaacctcagtgagttcattttcttaaaaagaaaaaatctgttgggcaccactgtaagcccagtgctgtactgggggctgaagataatgcatcaaacaagtcacacagagacagggttcctgccccaggaaatttaaagtccagcagggaagatgggcattcatcaaataataataaaataatcatctcatgaaatgaatgaatgcctgcaacatgcttagaactgcctggcacaaaggacatgctcacaagggcaattattattataattagacataattgtgataagtgctctaaagggagctttgggagcacaaaataggaaatagtagctaatcttgtggtgggtccgtaaggaaaagcttaccagaggaactggcttccaagctaacatgttcatgggtgagcatcaatcaaccattgcaaagtgtgttccaggcaaaggaaacagcaaggacaaaggccaaaggtagaaacgtgatatggcaccattgagaacctataggaagtccagtgagccttgggtgtagattgcagaaggaaataagacaaagggctcatctgggcaggaccttgaaggttgcaggaggagtttggatttatggtctagcacygggaaggtggaaaaggtcttgacgtgctctgacttgtcccagttctcatcctctactctttggctggttaaaagaaaaactttagacaaattaaacttagcagagtctatctgaacaaagaaacaattcatgaattgggcagcacamggaaccagtaaaggttcagagagctccatccagcaatgtggtcaggcactatttatccacagggaaaggaactgaggtactgaaacagcctgattggttacagctctgtgtttgccttatctgagcatgtctgggcagcttgtagcctgtgactggctgaagcttggctgccctgattgtccaaggttacttgttacaagaatatactctcaagtttgtttacatgttgagttacattacaatttgttatgtagggaggctgctttaggccaaatttaattgaatttaacatgcaccatccatgaaaggccccagaaacaaacccccagtcttgagtttcatcagtgacttcagtgatccagggtttggcccagcccccggttttgcgcagtacagtgacctccttccacattttatcttcaatgaraattgggaacatgtgtggtgatggcttgaatgtcaatgtcttctctcaattttgctatctgaagtttctttttttttttttgtcttcagacggagtcttcctgtgttgcccaggctggagtgcagtgtcacgatcacagctcactgcaacctctscctcccaggttcaagtgattctcctgcctcagcctcccgagtacctgaaactaygggcgcatgccaccatgcctggctatttttttttatttttagtagagactgggtttcaccgtgttagccaggatggtgctgatcttctgaccttgtgatatgcccacctcagtttctgaaagtcctgggattacaggcataagccactgcgactggcctgctaatttgttttaagagaggcagagatgtagggaaataaggacagagacagataagtaacaaagataatgagactgagaaacagagttagggacaaagagggaacacatagagatagagatggggagccagtggcagaaagacagagggcaaacctcagacagtatacagagaggaagagagagagacacagagagagagagagtcacgtaaggagaaggaggaggaggaggaataagaggagagagagtaggaaaaggaaggaggaggggagaaaggagggaaaggagagaaacagaataagagataggaaaaagagagagtgacataaaamgagaggaagaaagaatgaacaagacaaataaggtatctttagagggagatgaaaagaaagaatgagagagaaagagattggggagaaatcagattcaaatagatggagataggaagttaagcaagatggaagaaagccaaaaaaaggagaggaaaagaagaaaagctgtgtctgacaggtatagacagagaaaaagacaggagtagggctgccaggggcagaaagaaaggtataacccaagccaaaagggtactgcagccaaagaaattcgaaaggtgtccaaacagacggccccagagatggggagggcgtgatgagagggagataataagcctcaggctgttgtgaaaaatgttaggtcacacaaagagttacagaagaacaggcccagagacctgcctgtttctaagctcatgtcacccaccttctgggtatgccaaagggatgtggacacttttccaaacacctccacatagacacacttgtccaacaacttgacaggcatagggaatgcctgaaaactcacacttgacatggcctttccaaggtttgcagattatgaaacactgaagtgaagggaaaggctccctttgtctctgcctgagctttttccagcaccctttgttcttatttttctcccaatctgtggtttagaatctactgggggttccttgcacctctgrgaatcagtggaagccatagaccctccctgtctcatacgcatcagtcccattcacaatttatatacaattgggcttttccccccttgagctcttgaagcctgtggatctcaggctgagactagaagacagcctagagacacagacacagacacatggccagaaacacataccccacasataccccagaaacaaacacaaggcrrtaaccaaaccttaagsctccttagcasaagccaagtgctattctaagaatttttacaattgtctcctttaacctcacaagagccctttgagggaggtgccattctccccatatgagaagtgaagaacactaagaatgttgtcataaatgtgctcacactcacacatgtacaggtacacacacacacacacacacacacacacagaaccagaaatgggtcattatactctgtgggtttcaccaaccctttggaactgtaacagaagctagaaactctcttatataaaaatgaacatggcgccgggtgcagtggctcatgcctgtaatcccactttgggaggccaaggcaggtggattatctgaggtcaggagctcgaggctagcctggccaatatgatgataccccatgtctactaaaaatagaagaaattagccaggcgtggtggcaggtgcctgtaatcccagctacttggtaggctgaggcacaagaatcatttgaaccacctgggaggtggaggttgcagtgagccaagatggtgccactgtgctccagtctgggtgacaaagagagactccatctcaaaaaaaaaaaaaaaaaaaaaaaaaaagagagagagagagagagaaatgaacgtggcacatccactcaaagatttgcatctggtttcagagcagcttcctaaaagtccaccctgaattgtaggttaaaggccagtcttatgcaartctgttgcagtggacatttgtgtctgggcttagggacatggcagagcgaagtgtatgcacctgccctgtgcccacactggtgaccttctgtgtccacagggaagcggatttgtcttggtgaaggcatcgcccgtgcggaattgttcctcttcttcaccaccatcctccagaacttctccrtggccagccccgtggccccwgaagacatcgatctgacaccccaggagtgtggtgtgggcaaaatacccccaacataccagatccgcttcctgccccgctgaaggggctgagggaagggggtcaaaggattccagggtcattcagtgtccccrcctctgtagayaatggctctgactccccgcaacttcctgcctctgagagacctgctrcaagccagcttccttcccctccatggcaccagttgtctgaggtcrcaktgcaartgagtgcaggagtgagattatcgaaaattataatatacaaaatcatatatatatatatgttcttgttttttgagacagagtctcacactgttgcccaggctggagtgcagtggcgtgatctyggctcactgcaacctccacccccggggatcaagcaactctcctgcctcagcctccctagtagctgggattacaggcatgcactaccacgcttggctaatttttgtatttttagtagagatggggtttcactgtgtaggccaggctggtctcgaactcctgaactcaagtgattcacccaccttagcctcccaaagtgctgggattacaggcgtgagtcaccgtgcccagccatgtatatatataattttaaaaattaagctgaaattcacataacataaaattagctgttttaaagtgtaaaatttagtggcgtgtggttcattcacaaagctgtacaaccaccaccatctagttccaaacattttctttttttctgagatggagtctcactctgtcacccaggttcgagttcagtggtgccatctctgtccactgcaacctccacatcctgggttcaagtgattctcctgcctcagcctctggaggagctggtatcacaggcgtcccccaccacgcctggctaaattttgtatttttaggtggtcttgaactcctgatgtcaggtgattctcctagctccaaatgttttcattatctctcccccaacaaaacccatacctatcaagctgtcactccccataccccattctctttttcatctcggcccctgtcaatctggtttttgtcactatggacttaccaattctgaatatttcccataaacagaatcatacaatatttgatttttttttttttttgaaactaagccttgctctgtctcccaggctggagtgctatggtgcaatttttgttcactgcaacctctgccttccaagatcaagagattctccagtctcagctcccaagtagctgggattacaggcatgtactaccatgcctggctaattttcttgtakttttagtagggacatgttggccaggctggtkgtgagctcctggcctcaggtgatccacccacctcagtgttccwaagtgctgatattacaggcataatatgtgatcttttgtgtctggttsctttcaygttgaaygctatttttgaggttcrtgcctgttgtagaccacagtcacacactgctgtagtcttccccagtcctcattcccagctgcctcytcctactgcttccgtctatcaaaaagccyccttggcscaggttccctgagctgtgggattctgcactggtgctttggattccctgatatgttccttcaaatctgctgagaattaaataaacatctctaaagcctgacctccccacgtcaagaggtgatctgtgccattttgtgtgtgattcttttattgtcgggtctctagggatttttctggaaggaatgttggtgagaatgcctctctcacctcaatgccaactctgtgaagggccaaaccattgtcttgctcatccctgtactctcaacacagcgtgtggcatatgacaggtgttcaaaatatttggtgaggaatgaatgaatgagtggctaaatcagccaccccctacccccacagcccacccaaaatggagctaggcctcctccatcagactatatctcctccatatcccactttcttgtgaggtccagaataaattctcatccccaaagggcccaggatgcccccattctgcctaccagttactctcgataccccgtgctgcaatgccaccttttgataaagcttagcgctattcttgcagtggaaccactctaaatccagcctccaggctggacgcggtggctcatgcctataatcccagcactttgggaggccgacgcgggtggatcacttcaagtcaggggttcgagaccagcctgaccaacatacaaaaaccgtgtttcaactaaaaaagatacaacaattacccgggcatggtggtgtgcatctgtagtcccatctactcgggaggctgagacagggtgatcgcttgaatgcaggagggagaggttgcagtgagccaagttcccgccactgcactccagcctgggtgacaaagtgagactccgtttcataaataaataaataaataaatccagcctccaaacattccaccagcaggaccaccacccttccctgagggaggtgctgcaagtttaatatcattatcacaaggatacatcagccagcctgtggccagtgggaagctggccctgggactccaccctgagatgctaaccttttggcgtctgcagcatctgccatctttgggctccttgtagcctctgaagagttaacagagactctgccagtacaaatgcatggcacacattccctcaccaaccacagaaataacaaacagagcaacatgtcttttaagagcgacagcagaatggaaggcgggaggaatgaggaccacggtgccctcagccttctcactcctcattgtccccagtggcctcttgctactctggttctggggccatcccacctcccagggctgcctctctcctaggccctggcctctgcccttcctgggggagcattttgcaaataaaccacagggctttctgaagtctgtccaggtggtgagatgggagagtgtggaagggatggaaaaggaggaggtgggtagacgggaaacagctcacaggcagcaaggcagttggggtcgtactttgggtgggaytccacagacaagcttgggaattcctttctggcttatatattaactacagaagcttctggaattttataaggtgaaatggagaggagacagactggagggtgaaattctgatagacttgaggctttgagatgtggtcctggggtggagcaagacaagaaaagtactggagattggggtttgaggagtctatgcaattatttttatttttaaaaatctttgtggctacatagcaggtgtatatatttawgtggtaagtgagatatttcgatacagacatacaatgtataatcacagacatacaatgtagacaggcataaagtgtatagtcacatataataataacatcatggtaaatggggtaaccatcacctcaagcactcatcatttctttgtgttacattagagttatattccctctgttatgctaaaatgtaccacaggctgggcacagtggttcatgcctataatcccagtattttgggaggctgaggcagacagattgcctgagctgaggagttcgaaaccaccctgggcaacatggtgaaaccctgtctctacaaaaatacaaaaaaaaattagccaggcatggtggcatgcatctgtaatcccagctactctggaggctgaagcgggagaattgcttgagcctggtaggtggagtttgcagtaagccaagattgtgccactgcagtcccgcttgggtgacagagtgagactccatctcaaaaaaataaacaagcaaacaaacaaaagtacaatgaattattgctgacggccatcaccttattgtgctatcaaaaactagatcttattcattgtatcgaactctatttttgtacccattagccatccccagtccctcacctccacccttcccagtctctggtaaccatcattctactctatctccatgagttaaattgtcataatttttagctcccacgaatgagtgagaatgtgcaaagtttgcctttccgtgcctggcttatttcacctaacataatgtcctgcagttccatccatgttgctgcaaatagcaggatatcattcttttttaatggttgaatagtactcccttctgtatgggcaccatatgaacacttaggttgattccataacttggctcttgcaaacagagctgcaaaatacactggagtgcagatatctcttcagtatacggatttccttttttttgatatagatttagcggtgggattgctggattgtgtggtagctctatttttagtggttttctttctttttgtttgtttattttatttctttattcattttttttgagatggagtcttactctgtcacccaggctggagtgcagtggtatgatctcagctcactgcagcctccacctcctgggttcaagcgattctcctgcctcagcatcctgagtagctgggactacaggcacccgccgacacgcttggatgatttttgtaattttagtagagatggagtttcaccacgttggccaggctggtcttgaactcctgacctcagatgactcgcccacctcagcctcccaaagtgctgggattacaggcatgagccaccgcacctggcctattctacttttttttttctttttcttaaggaaactccatgttgttcctcaaagtggctctattaatttacattaccaccaacagtgtacaagggttccatggggattacttcagattgagtggtcagagagggctcctttgagaagacttctgagaattggccatgggaaggtgtggggagaagccttctcagctgagggaacagcaaggtcaaagacccagaggtaagaaagcaagcttggaaccttccaggagcaacaaggcattggctctgataatgccttctcctgctaaaatgacagctctaggaaggcagggttcttatttcctgtctatctatctatctatctatctatctatctatctatctatctatctactatctatcatctatctatctatcatatatctatctatccgtctgtctttatttatttatagaggcagagtcttgctctattgtccattgtattagtccattttcatgctgctgataaagacataccgtagactgggtaatttataaagaaaaaaagtttaataaactcacagttccacatggctgcggaggcctcacaatcatgctgaaaggcaaaagttgcgtcttacatggtggctggcaagagagagaatgagaaccaagagaacggggtttccccttataaaaccaacagatctcatgagacttattcactactatgagaacagtatgggggaaaccacccctatgattcaatgatcacccaccgggtccctcccacaacacgtggggattatgggagctgcaattctagatgagatttgggtggggacacagccaaaccatatcaccaaggctggagtgcagtggtatgatcatggctcattgcagcctccaacttctgggttcaagcaatcctcccacctcagcctcctgattagtggtgactacaggtgtgtgacaccacctctggctggcttttaaattttttggagagatggagtcttgctattttgcccaggctggtctcaaactcttggtctcaaatgatcttcccatcttgacttcccaaagcactgagattacaggtgtgagccattgcacctggctggttctcatttatttaagtattactgctgtcatggtttgctttggtccctgtgggttcccccaccctttgaaacaagtgcctgacacatggtagggttcacaataaatatttgtagaataaataagagctgagccttcaaggggtccaaaatacttgcacggagtttttctaggtgggcacgatgccacccagctgcaggactatttcagggtgttcattggctcctctggttgatcttttgatgcctgtataagaactcccacttctccaaatctgggggccacatctttagagttctcagctttctgtctctcaggaatgaaggagataatatcactgattggagccagattgtctggatgttgaatcccagctccttgctggtgcctttgagaagtgactttagccctccatgtgccttatttctgcctctgtaaacggagatcatcatagcacctctcatgtggggctgtttgacgattcggtgaggtatgtgcaaagagctttttgcacttgcaaaaagtgtctgggatatcattgtgtgctgtaagaatgagctgtaatgattatcactgagacttgttgttgggattaaaagagatcaggtctgtcagggcctggtacacaagaggtactagaaaaataatgggaggtttaggtgctccttcctccagatacactcgtaaatatgactgctgtgtcgtcatctactttttagggatatgaagaatctgctgtgtgaccttagatgaataaatctctgattcactctgggccttggttttccctgcctctgaaaggggtatgatgtttccttcccttttgcctgggcgcaggtactgggtgctttgtagttaagggagtatcagctggtggctcaagggtagattctaacaggaacttccaagctggagaaatactaggctacacctcagagaggggaggtgggtaagggaggcccctgctggtgtgagcaggaggtgggtgagggaggcccctgctggtgtgagctcgatcctttatccctgagcttcagactctcttaagccttcccacatgagaaactgacatccagatggaggtggggaccctgcaatgtaaagccaggtcacctgtccacagaggtgtgtctgataaccagggcatgataggttagagagtgtggtggctaaaagcaccagcccttggatcacctgaggtcaggagttcaagacctgcctggccaacatggtgaaactccatctctactaaacatacaaaaattagcttggtgtggtggtgggcacctgtaatcccagctacttgggaggccgaagcaggagaatcacttgaacccaggaggcagaggttgcagtgagctgagattgcgccatttcactccagcctgggtgacaaaagcgaaactctgtctcaaaaaaagcaccagccttagactcagagagaccaggatttgagcttgggggacctcagcttcctctctgtgtgacctcaggtaagccacttatactctttgggcctcagtttcctcatttgtaaaattgaggccgtgattgaacctccttcaagagctgttgtgagtgctataggggatactatcttaaagcacttaatgcagtgcctggcacatggtagttctgtagaagtgcttgctattttaattcacgtgcacaggtcctgcctgtgggtgagggctcagtagatggaacagcgatggttgatatagttgggattgtgaggattattatgacaggggctaatttgaatgggcctgtgttgtctgccctccccactgccagcctgatttccctctgcctggctttgcagctcctcccattggctgctggggtgtaccccttgcatgcggatgagaaacgagtcaatgaagtcccgtggggaattgggatccagcgtgcactggttgtgctccactttcttggcaatgaagtcctccagcccttgcagctccttaaaggc

SEQ ID NO: 94426 - DNA, 25923 bp, Homo sapiens
acacgacagagagaaagcctgtctcaaaaaataaaaataaaaaagaatgttcagagcagcttatagccaaaaactggaaacaaatcaaatgttcatcaacaggtgaatggataaagaaattatggtatattcatacagtgaaatacattagcaagactggcacagtggctcatgcctataatcccagcactttgggagactgacacaggcaaatcatttaaggtcaagagttcaggaccagcctgggcaacatagtgagactccatctctaaaaaaataaaaaacaggccgggcgcagtggctcacgtctgtaatcccagcactttgggaggcctaagcgggcagatcacgaggtcaggagattgagaccgtcctggctaacatggtgaaaccccgtctctattaaaaatacaaaaaattagccgggtgaggttgcaggcgcctgtattcccagctactcgggaggctgaggcaggagaatggcctgaacccaggaggcggagcttgcagtgagccgagatcgtgccactgcactccagcctgggcgacagagggagactccgtctcaaaaataaataaataaatgaataaataaataaataataaaaataaaaaacaaaaaaagtagctgggcatggtggtacaggcttatagtcccagctaattggggtgccaaagcaggaggatcacttgagctgaggaggtaaaagaaagagggaaggaaggaaggaaggaaggaaggaaggaaggaaggaaggaaggaaggaaggaaggaaggaaggaaggaaggggcaatacctaccattataccatttctggtgcgtgttttttaatagccatcctaatgaacacgaagttatatctcttgcttttgatttttatttccctagatggctagtgattttgaacatcttttcataaaagggtctttttaagatgggagaaatacagcttattggggttttttgtttgtttgttttgttttgttttttgagacagagtctccctctgttgcccaggctggagtgcagtggtgtgatctcggctcactgcgacctctgcctcccgggttcaagcaattctcctgcctcagcctcctgagtagctgggactacaggcacacaccaccatgccaagctatttttgtatttttagtagagtcggggttttaccatgttggccaggctggtcttgaactcctgatctctattgatctgcccatctcagcctcccaaagtgccgaattacaggcatgagccaccatgcccggccagcttattggctctttatgaaaaatattcaatagagagaagaaaacaaatcacacaggaaatgaaaacatgacacagccactttggaaaagagtttggaagtttcttataaatatacactcatcatagaacccagcagtcacactcacagatatatccagatacacgaaacatagatccccacaaagacatatgcatatatgccaagaataatacatattattcaaaatagccagaccttgggaacaatccacatttccatcaactggtgaaaagcaaattgtggcacatctatatgcggtgacatgctactctgcaatgaaaaggaatgagcttctgatgtatgtaacacatggttaactctcaaaagcattacgtatgcttcccagaagcaggcttggtatatggaagaaatgctgtagattttcttttcttttttttttttttgagacggagtctcgctctgtcgcccaggctggagtacagtggcatgatcttggctcactgccacctccgcctcccaggttcaagtgattctcctgcctcaggctcccgactagctgggattacaggcaccctccatcaagtccagctaatttttgtatttttcatagagagaggggttcaccacgttggccaggctggtctcaaattcctgacctcaggtgatccacccgcctcagcctcccaaaaagctaagattacaggcgtgagccaccatgcccagccgtagattttcatttatatgaaatgtagatcaatagtgggaagaaaaaactagaacagggctggatgcagtggctcaagcctgtaatcccagcactctgggaggctgaggcagaaggattgcttgagcccaggagttcgagatcagcctgggcaacatagggagacctctgcctctacaaaaaatttttaaattagccagttgtgatggcacaggcctctacttccagctactcaggaggctgaggccgggggatcatttgagccagggaggtcaaggttgcagtgaacaatgatcacaccactgcactccagcctgggggacagagcaagaccctgtctcaaaagaagagaaaaaaacctagaacaatggttgcccacaagagatggagcatggttgactaggaaggagtaggaaggagggttctcttttcattattattattactttagagaagggagtctctctttgtcacccaggctggagtgcaggggtgtgttcatagctcactgtagcctggaactcctgggtgcaagtgatcttccacctcagccccttgagtagctgggattacaagcgtgcaccaccacacttagctattgtttttttcttttttttagtagagacaggggtctcgcaatgttgcacagcctggtctcaaatttctggcctctagtgatccttccacctcagcctcctatagctaggattataggcacaaaccaccacgcccagctccaagagaactttcttggatgatgaaaatattctgtatcttcacagggatttcgataccttcaaaattcagcaaatgttcacttaccatgtgtgtatttcatcacaggtaaattttacctaaagaaatcgttaagggaaaactccatctacacaccttcacaggaactatgacacagtaaatagaatcaagtcctccagttggcgatggaatgggatctggcacaccagaagggggctcacctaagcctgacatgggacactgtgtggttctagcaggaaggaaggctgcatgtgccgtccagatgccagtgggcaagaggacaggatgatggaggatgcgcccgcttactgcccattgctgccattctctccgtgagataagaagcgggttcatcaacaaagagtgaggtgactgaagagggttttggagtttgaggaggcaggaacaaaaggataggaatagggcggggggagttccaagagaggacaatgagaggcgaggcatttttccaccacggagtgtgtttcagctttctgcaataccccagcggttctcaactgggttgatttttttcctcccaaggggacattcaatagtatctggagtcatgtttgtttgtaacaactggtagggaatgagtgggtgggttctgtcatctactgagtagaaaccaaggacactgctaaacatcctaccacacacaggatgcagcccccaccacccatgaaggcccaagacatcaacagcagtgagttgagaaattgcaatacatcccttccttgccccaagttccctctgtagcaggagagcaagtcagaataacagaactcaaagcctcttaaaaccccccttctcggccacacatggtggctcacgcctgtaatccccagaggcccaggtgggaggatcgcttgagcccaggagttggggaccagactgggtgacatagcatgctagatctcatctctactaaaaattttaaaaattagccaggtgtggtgatgcgtgcttgtagtcccagctacttgggaagctgaggcaggagaatcccttaagcccaggagatcgaggctgcaatgagctatgatcacaccactaaactccagtctgggtgacagagtgagaccctgtgtcaaaacaaactaactaactgcccttcccataaatcccagtttccccaatcaggtggtcccattaggcccatcttttttttctttttttttcttttttttgagtcaaagtttcactcttgttgcccaggctggagtgcaatggtacaatctcagctcactgcaacctccacctcccgggttcaagtgattctcctgcctcagcctcctgagtagctgggattataggcaagcaccaccacgcctggctaattttttttgtatttttagtagagacagggttttgccatgttggtcaggctgtctcaaactcctgacctcaggtgatccacccacctcggcctcccaaagtgctgggattacaggcatgagccaccacgcccagcctcattaggcccctcttaaccaagttctagggtgagggataagttgcttacagggttggcgtggatacagcactacaccctccccttaaaagtagggagtagacgccaagggaaactagagctatataatcccatcatcaagccttcagccctcttccaggacctgccccaaccggcctatccaggactgaaacaacagcatgggccccacctccaccccaccatatgcctgggacctagggtgtcaaattccccaggacctccaaacacttcctcctctgcccctctgagaacagcaatcctggtgcacacccacgaacctgtgggggtacccacacctccacctggcctcccagacccttgaccgcaggggctctccacccagcctagcccctggcaccagagccctggcccagctccaggttttgcattctgcccttgtgacctggccaggaggtgggtaactagggccagtttcttcttcttttttttttttttttttttttgagaccgagtctcaccctgttgcccaggctggagtgcagtggcatgttcttagctcactgcaacctccacctcccgggttcaagcgattctcctgccccagcctcccaagtagctcagactacaggcgtgagccaccatgcctggctaatttttgtattattagtagagacagggtttcaccatgttggccaggctggtcttgaactcctgacctcaggtgatccacccacctcggcctcccaaagtgctgggattacaggcgtgagccactgcgcctggcctactagggtgagtttctaaggcaggagctgagagtagacatggctagtagggtgctcaggagggcaggaggagggctgtttatgagccagtggtgggagagagtgtcattctagtctgagaggctttttccctgtggcttccagctctgcccttttcttaaacactccttcagcctcagcttggcttcagtcccaccaagtgcagtctgactcgtggagacatgagagatagagagagtgagagaccagagagatcaggagacagtgactgagagggacttacagggagatcagggagagaagcagagagaaggagaaagcccagagagcataagaaatgaagacccagagacaccaaaggagggagagacagagacacagagagacaaaaagattcagaggcagagactgtagaggcagaagcaaagcaagacacagagcatttcagagacccacggcaagagacagggaacagcatggagaactatgaaaaaataggcttccagagaaagagaaaactccagctctggagggaaagggacttagccagggccactcggcccatcagtggcagaaatggacttgaacccagagaaaaagaaacaagtgccccaaataccaaaggaacccagcccccatccctggcccatcattttgcracagccccatgactaccccaaaaccaggcccaggctccaactggcaaagcaaaaaaaaaaaacaaagaaagaaagaaagctttgccccatcccaggagggcccccaggcgcagccccctcccacggcacctttccagctggctgtgagccctagggccgcaggaaaggtatggcaagatgatgggagggatttaaagttcacagcgagaacaagaaaagtggggttaaggaggagggtgtgggcagaaacaacttaagaacaacctctgccccaccaccccccaagcacacccagagctgcaggctctagcgcatcccagccagtgtctcctgcagctcagcaggtaaagggccccrgtgagggargcagagaaggagggggtgtctcccaagagagggtgggtcgccagctccaatctctgtctctgagactggctaggaatcttttttgctgtttcctctgagagctctcatgtccctgttctgagcactgggatttctgtactggtgcttcaccaagtaggtggcttctctctctgcaatgcaaccccatggttggcaacacttgattttttcctgtcactgtttctgcctgtgcccttcctctctgtctccgkctctttctctctctctctctctctttttttttttttttttttttttgaggctggagtgcagtggttcaatctcagctcactgcaacctccacctcctgggttcaagcgattctcctgcctcagcctcctgagtagctgggattacaggtgcctaacaccacgcctgactaatttttgtgtttttagtagagacagggtttcaccatgttggccaggctggtctcaaactcctgacctcaagtgatccgcctgcctcggcctcccagagtgctgggattacaggcgtgagccaccgtgcccrgcctcagtctctcttggtctgccctttgcagcctacccgtctctttgtgtggctctaatattccctgcctctcttattctctctctctctctctccatctctgtctatgtgactctgtctttgtgtatctgtttctgtctgtcattctcgtctccctcagtctctgtgtctagctctgtctctccctctctctgtccctcttaccctttttctctccatccttccatgtccctctctgtctctcagtcagtgtccatctcactgtctctccactcaatctcccttgtctttctctagctctgtgtctgtctagttctgtctctttctttctctagtctatgtcagcctctctctttctgtgatgtgctctctggctctccctatctctgtgtttgtctgtctctgtccctgtgtgtcttgatctctctttatcactgtctctgtatgacagtctcttgacagacaggtgatgatagatagataatagacagatgatacacagatgatagattatgaagatagtagatagatgatagatatagatagataatagatgatagataatagacagatcaatgatagatgatagaagaatagatagatgatggatagacagatgatagatgatagatagatagatagatgatagatagatgttgatagatgttagataatagatgagaaacaaagaaagaaagaaaaagaaaaaagaaagaargaaaaagaaaggaaggaaggaaggaaagaaagagtgatagatgatagatggctgataggtagacagacatctgtagatatgtagatcgctcactgtttttctgtctctctcattatctttatgcatatctcttggcctctcttagtctctgttcctctatcacttgcctctctccatttatgtctctgtgtttctgtctccttatctgtctatatgttgactatctctgcctctttcctcctttctccctcccttccccatcccctggcctctccctgtctccttctctccatctgccttcatttccagggcctagggaaggtaagtcccaggggagatggaaaggagggatcagcgatgtcctctcccactttgccctccacacgccagcagctgccttcaccatggacagcataagcacagccatcttactcctgctcctggctctcgtctgtctgctcctgaccctaagctcaagagataagggaaagctgcctccrggacccagacccctcycaatcctgggaaacctgctgctgctttgctcccaagacatgctgacttctctcactaaggtrcaaggcccttagcttgggtgatggtggaaggataaggaggaggggtcccatggccacaggcccccctgtaacttctgtcttcctaccctcagctgagcaaggagtatggctccatgtacacagtgcacctgggacccaggcgggtggtggtcctcagcgggtaccaagctgtgaaggaggccctggtggaccagggagaggagtttagtggccscggtgactaccctgcctttttcaactttaccaagggcaatggtaagcctcgtccttgtctcctccgctctcggccttttccatattgagggagggggtgagggtgagagactgttgtctcaatcttgttgacaytcagggctgctgacatcactgatgacaccaaatgcaatgcagcgaggcagtgttggtctatggcaaattctctcccaccttcctcacctccagatcccaccactttcctgaattgtactcttgcaccactcctcatctccatccaaccccaaccccattgtcatcccaatccctagctctatcccaaccgcatcatcaactttccaactcagtcaagtggccccagttcccactgaccacctcaacccaatcccagtccccatcaacctttccccagtgttcaccacatcagccccaccttcatccctatccacaacactgacagcatctcaatccaaccttcattcccattatgaaccccatcccagtccccactttaaattctattatcaaccccatcctagtccctttagtcaaactgaattttttttttttatctgagatgagtcttgctctgtcacccaggccggagtgaagtggcacaatctcggcccactgcaacctctgcctcccaggctcatgcgattctcctgcctcagcctcctgagtagctgggactacaggtgcacactaccacacctggttaatgttttgtatttttagtagagatggggttttgccatgttggtcaggctggtctcaaactcctaacctcaggtgatccaccyacctcggcatcccaacgtgctgggattacaggcamgagccactgctcctggcccaaactgaattctgctgytactttcccccaatcccagccccatctcctaacccaattacctattgaaatttccagttcccagttcttgctttcaatcttaaactsactaccatcaccaaaacaaccccatcacatatctacccaaccccaagttcaagctcagtcccaatctatcaatcctcctcatcctacccaactccatccacatcaccagcttcaaatacaatttatcatcaatcttataacccccttcattccccattgtcattcccaacctaacccaaactcaactccatcctcagccatccagcaattcatatcattcacttaaaacctcatctatgtcaatatcttgtccctctaaggcttggaatcaccctagtcctgtggtcttcaaactttatttatttatttatttatttatttatttttgagatggagtctcgttctgttgcccaggctggaaagcaatgacgcaatctcagytcactgcaatctccgcctcccaggttgatgccattctcctgcctcagcctcctgagtagctgggactacagrcacctgccaccatgcccagctaatttttgtatttttagtagagactgggtttcaccatgttggccaggctggtcttgaatgcctgacctcatgatccagcagcctcagactcccaaagtgctgggattacaggtgtgagccactgcacccagccccaaactttatttcaaagacaaatctctgttcaaaggaagctatgtgacaagacccaataaatgatggaaggraggagggaccaacagaaggaaggaggaagaaaggaaaaaggaaagaaggaaggaaaggaaggagggagggagggaaagaatgaaggaaggaaggaaggatggaaggaagccatcatgattggaaaggggatcctggagacctgcatcctggactattctctcctcacctccaaagaatgtctagggctctccctggctcctgcattagatgggtcccagctgccccaggatttgaaatcagagagctctggtacaatattacaatattacaatattgtgtattaggtacasgttccatccttcatgctcccttccctggcttgatctgatgaccttacctgtccaggtacaccagatgcaaagaggtggagacagggcacttgagaaagtcaccttgctacttttgcacagaaaacatctggatgggtacatcgtttgttaccaaaaatagccaccatctagttattcaatacacagcacagagggtaacagcagggttccaccactcactagctgtgtacccttgggccagaggcctcccttctcttcctcttagtttgctaccatgagaaaattataatagcattaactccatgttatgaggagtcaatgagacaatgcataaaaatgcaggcaatacactatagtcttttttctcttcttctttagtatctagttctctgctaggtccagaggaaccagagataaacacatctgagactttatcctatagtaggtcccagtccagtggaagacacaggcatcaccaaccagattgtgccatcccagagtggtccaggctgggatgggggaagcctggggagctatggaaaccctagagaaacacttggcccagcctagaagggaggaggagccagagaaggcttcctggaagaggggacctctaagctgaaacctaaagaatgaagatgagtattcaggagaaggcagggggtgaaagtgctctgggaaagaccagcctgtgcaaagattctgggtccaggaagagaagagacggggtctgttttgttcctggatgaattcccagtgtcctggtgcttatttttcttgcctatctctcttattcatgcatttaataatcaataagcaggccaggcacgatggctcacacctgtaatcccagcactttgggaggcygaggtgagtggatctcctgaggtcaggagtttggtaccagcctggccaacatggtgaaacctcatctctattaaaaatacaaaaattaggccaggcgcagtggctcatgcctgtaatcccagcactgtgggaggccaagacgggtggatcacgaggtcaggagatcgagaccatccttgccatgcctgtaatcccagctactggggaggctgaggcagaagaattgcttgaacccgggaggcggaggttgcagtaagctgagattgtgccactgcactccagcctggcaacagagcaagactccgtctctctctctctctctctctctctctctctctctctatatatatatatatatatatatatatacacacacacacacacacacacacacacacacacacacatatatattaggtgggcgtggtggtgcacacctgtaatcccagctagtcaggaggctgaggcaggagaatcacctgaacccgggaggcggagggtgcagcaagctgagatggtgtcactgcactccagcctgggtaacagagcgagactgtgtcgcaaaaaataataatcatcatcaataagtaatcaccagcacctcctgtgtgacaccctctgcactggacaatgctaaggacccagtggtgaccaagacaggcacccactctgccttcacagttctgtgaaggagacagccccatcaccagacagtaacagcccagagtgatcaggttcttaatggggaaacagaggcagagtgataggatggtcgtgagggaagcccatggtcctatggaagcttgaaggagayccctaagctggagggtccagaagggcttactggaaggagccagggagattccaaactctgtcyctctcccagcaaataccatgaaaggggacctgggtggcagtggcctcaggatgagttcccggttaagctggtcccctcctcttstccccaggcatcgccttctccagtggggatcgatggaaggtcctgagacagttctctatccagattctacggaatttcgggatggggaagagaagcattgaggagcgaatcctagaggagggcagcttcctgctggcggagctgcggaaaactgaaggtcaggaattttttttaacaggctggatggcacgatctttttttttttaacaggctggatggcagccttgacctcctgggcccaaaccatcctcccacctcaacctcccgaatagctggtacttcaggtgtgctccaccacacccagcttatttttaaattttttgtagagacagggtctcactatgttgcccaggccagtctcaaactcctgtgtgcaaatgatcctcttgcctctgcctcccagagtgctggaactataggcatacaccaccatgtctggccaggtctttgaatccagttcatccttataattcacatccattctacttttttttttttgagacagagtctcgctctgtcccccaggctggagtgcaatggtgtgatctcagctcattgcaacctccgcctcctgagttcaagcgattctgcttgctgactgctctgtcgcccaggctgggttgctgtgtactagcgtgtgttgtgtggcaggattatgtagctgtatgctggctttatgtgttggtgtgtggttaccgtgtcttgggatgtttccgggctggctgttaggtcactgcgtgtcgtgtgttggcatgtactgtgatcgtatttgctgggtgttctgttgccctgtgttgttgtgttccgtgatgcctgatgattgccttgtgctatgtcgcgtgctgtgtgttgtgttgccaagaatagcccgttctgtggttgggcgttgttgctgtcgatgtgctgcaggaagttgtgggttcggtgccgtctgtggcattgacagatgcttttggggtgtcgttaagcagcatgttgtgaccatgtccccgtgtttgcaccgtaagacacgttgccatggttgagtcggatgttgtacaaattaatggtgttgctgcatgaggtctggtgtgctgcacatcgcgtcttcctgatccattgcactccttaccctcaggcgagccctttgaccccacgtttgtgctgagtcgctcaskgtccaacattatctgttccgtgctcttcggcagccgcttcgactatgatgatgagcgtctgctcaccattatccgccttatcaatgacaacttccaaatcatgagcagcccctggggcgaggtcagccaactgagtccagcaggggcagggtgtggggtccgcaggatctaggaatggagaggaaacagtgggcggggaaagggctgtgaatggcccgcccagggcccgccccctcccatctgaccccacccagagttacacggccacgcccactccccyccactgagcatttatggccgccattgcctccttcccactccccctcagccccaacccccaccccggacctggctgccctttgagaccctgtccctgcctacctaatccacactgaccccattcgcccctgaacacccttcgtcctcctccaaaaccctcctactctgtctggtccccagttgtacracatcttcccgagcctcctggactgggtgcctgggccgcaccaacgcatcttccagaacttcaagtgcctgagagacctcatcgcccacagcgtccacgaccaccaggcctcgctagaccccagatctccccgggacttcatccactgcttcctcaccaagatggcagaggtaatccctacctggaaatcccacctctagtctgacctgaaattctcctgctgcccctgcctcaaacccacagggaccccagatggggcagggttgggggaccttctccctggagaagctgaagcatctggcccagctgggctggagccaggagccactcgcagccaccgccaacttacagctcattaagaagtcatcaaaggaggtggggcagggtggagggggcagttgctcaggcttgttatcccagcactttggaaggccgaggcaggaggatcgcttgagtccaggagttcgagaccagcctggacaatatagtaagacccagtctctacaacacatacgtacacacatacatacacacacacatacatacatacatacacacacacatacacacatacatacatacatcatacatacatacacacatacatacatacacacatacatacataaaacgtattttttaaaaaaacaagaagtcattcaagctctatccaagaagttaattgtaggccctgcagctgagattttccctgccctgcccttctccgttccccagctctcccagggaaagaaagttaaacccagctgggaccgaatgggcccccagcagcagttgtactggtctagagkgaaggggcctccattcctggctcacatccccacccctctaccaatgcaggagaaggaggacccactgagccacttccacatggataccctgctgatgaccacacataacctgctctttggcggcaccaagacggtgagcaccacgctgcaccacgccttcctggcactcatgaagtacccaaaagttcaaggtgaggcccacccacacagcagcgtggaggtgcccatgtgttccagcctcaccccagagcagggagccacggccccgcctcccaggtctgatatagcctcctgctggcaccaggattccacagccaaacccacaaacccacacggaggccgatcccaccacatggcccatgaggtccatgcagcctgcccgaatcccgacccagatcccacccgcttaattgttggtttttttgtctttgttttgttttttggagacggagtctggctctgtcacccaggctggagtgcagtggcgtgatctcgatccgctcactgcaacctccccctcccgagttcaagggattctcctgcctcagcctcccaagtagctgggattacagcctcccaagtagctgggattacaccaccacatccagctaatttttctatttttagtagagacagggtttcaccaagttggccaggctggtctcaaactcctggcctcaagtgatccacctgcctcagcctcccaaagtgctgggattacaggcgtgagccactacacccagctctgcttagttttttgtttgtttttgagacagactcactctgtcgcccaggctggagtacagtgccgtaattacagctcactgcagccccttgggctcaagcaatctccccacctccgccttatcaatagctgggagtacaggcgtgcaccaccacactcaatacactcagctaattttttattttttgtagagacagggtctcgctgtgttgccctggctggtccccaactcctgggctcaagcaatcctctcaccttggcctcccaaagtgctggggttacaggtgtgagccaccgctcctgcctccacccgcttagtcttgctttgtgccgagtgcgtcaaccaccacatgcgtccacctccggcttcagagccctgccctggagccccagccatgtgcctgccagggaaccctacctctcccatgcagcctggcccacacacacagctctgtctgctgctccacctcccyaagctccatctctgggtgtatcccctgctctgcccctgatctccagccctcccacacagtccacccactcgacctaccgtccagccagtagagccccaaaactgctcctgaaatcccatcaggtcctggattccaggcctccctgaagccctgcccacacaacccaacactcaggcccttgcacaagccaagctttcgccctcactgacccacttcctcccagaccctggctaattcttttttttttttcctcttcccccccccyyttttttttttttttttttttttttgagacggaatcttgctctgtcacccaggctgaagtgcagtggcctgatcccagctcactgcaacctcctcctcctgggttcaagtgattctcctgcctcagcctcccaagcagctgggaccacaggtgtgcgccaccaagcccagctaatttttctattttgttgtggagattgggtttcaccatgttgcccagatggtctcaaactcctgggctcaagcgatcmgtccgcctgggcctcccaagtgctgggattacaggcgtgagccaccgcgcccggccagctctagctaattctcacgtgcgccccagcagtggcgccccgcgctgggagactttgactagacgcctccccacacacgcacacacctcttatcagcctggttgccctgtcgcgcccgctgataccctcgaccccgcttcccgcttcctctccagcccgcgtgcaggaggagatcgacctcgtggtgggacgcgcgcggctgccggcgctgaaggaccgcgcggccatgccttacacagacgcggtgatccacgaggtgcagcgctttgcagacatcatccccatgaacttgccgcaccgcgtcactagggacacggcctttcgcggcttcctgatacccaaggtgcgctaggcctggcaaacgacatcaggcaacctaagaggaggcatcgcaggctcttgcactggcaaggagtatcccaggcactagccatgaacaccccaggccttagcaactggcatcccaagccctagctacagacatctcagacccttaaatccagaagctcaggcctttgccaggaccccatctcatatcatagtggactagaccccttcaccrtgacaaatccccttcctagaacccctccctggaagccctggggtctggaacttcatctggaggatcccctgggcctaaacgctattctcagggacccctccttttccccagaaaccccacatctgttcccacaaaggttgggggtttcccacatccctgccaaagtccccaataatacagcatatagcacccatcacttggaaccctagacacccacacatatttccttggcccccgattgagtcctatacccacctatacccaccccttatcaagtccccaggacacccagcccaatacaatggaaaggagtttgggagcctcccagccctcctacactgctaagtccacctcctcacccacacagggcaccgatgtcatcacmctccttaacaccgtccactacgaccccagccagttcctgacgccccaggagttcaaccccgagcattttttggatgccaatcagtccttcaagaagagtccagccttcatgcccttctcagctggtgagggcaggaatcagagtctttctggcccaatttctacctacattcctcaccctaattccacttgccaaatcctctcactccttccttccacccattctcagctttggatgcacagagacattcattcctcctctcaactctgctcctataggcaagtagtgactaaaatcctcgtgaagcaaggtggggaggttgattaataatttaacttgggactgggcatggtgactcacacctgtaatcccagcactttgggaggctgaggtgggtggatcgcctgaggtcaggagttcgagaccagcctgaccaatatggtgaaaccctgtctctacttaaaatacaaaaattagctgggtgtggtggtgggcgcatgtagtccccgctactctggaggctgagacaggaaaatcacttgaacmcaggaggcggaggttgcagtgagccgagattgcaccattgtacagagagagactctgtctcaaaaaaaataatgataataatttaacagccaggggcrgttgctcacacctgtaatcccagcactttgggagatctaggcgggcagattacctgaagtcaggagttcaagattagcctgaccaacatggtgaaaccctgtctctactaaaaatacaaaattagccaggaatggtggcacatgtttgtaatcccagctactctggaggctgaggcagragaatcacttgaacccgggaggcggaggttgcagtgagccaagatcatgtcattgcactccagcctgggcaacaagarcaaaactccatctcaaaaaatgaataaataataattataataattattatttaacttgggccaggcacattggctcacacctgtaatcccatcactttgggaggctgaggcgggaggatcgcttgaggccaggagttcaagaccagcctggacaacatggcaagaccctttctctactgaaaatgttaaaattacctagatgtggtgtggtgtgcatctgyggtcccagctacttgggaggctgaggtgggatgatcacttgagctcaggagtttgaggttacagtgagtatgatcatgccactgcactccagtctgggcaacagagcgagatcctttctctaaaataaaaaatactgactagccaaaaataaaaaatatataaaaattttaaaagaaaaaaaaattgaacttgggagtggtcattgtttacctctccactgggtggcgcagttgaggtggttctaggggtttttgttttgtttgtttgttttttggctttcctctttaccctgctgaaaaactccctctttactcagtggcaggaaaagaaaaaacaaaaaactggcataataataggtaacttaccatattgcctactgtgcgtcaagtgctgcctctacaagagcccagctaagagcttatgttttcctctgggaatgtgtggcccagattccagcagggtttgcatcccatctgtcaccccctagctgtgttgccttgggyatgttactccacttctctgtgcctcaatgtccacatctataaaatggagataatactaaggcctgcctcttggagttgttagaattaattgcgatgtaatgctcagagtaatgcatggcccatggtaagctacttacagcctcactgctttccctgtgtttaccattcacagcagcctcatgaggcactattactatccctccttttatttttctttctgagacagggtcttgctgtcacccaggctagagggcagtggcacgatcatggctcactgcagccttgatctcctgggctcaagtgatcccctcgcctcagcctcccaagcagctgggactgcaggcatgtgccaccttgcacatttttaaaattttttttgtagagatgggatcttgctgtgttgcccaggctgctctcaaactcctgggctcaagggatcctcttccctcggcctccgaaaatgctgggattacaggcctaagccagcacgcccagccttcatatccccattttaaatatccagaacgtgtggtttgtccaggatcacaaaactagtagtgacagggccaggattcgaacccaagcagcccaggtcattccactccacagtttaaagcatctttcccagttctttacatgggtgaatctgtgacgtccccagctgctgtcttcctttcctcttatgttttcctctgggaatgtggggttgcagcctctaacctcatcttatctcaccrccgctccccatcctgccacccctgcagggcgccgtctgtgcctgggagagtcgctggcgcgcatggagctctttctgtacctcacygccatcctgcagagcttttcgctgcagccgctgggtgcgcccgaggacatcgacctgacccyactcagctcaggtcttggcaatttgccgcggcctttccagctgtgcctgcgcccgcgctaacgccccggcccttccagattcgcctgtgagcgatgaggcccrcccatgcgggttgctacgtccccttcttggtccacagtctgccctcatccctctggcagtcacgctgtcttccctgcatgctgtgcctgccgcgtgcccttcccccatccctccaatctgtrccctgtctgcagggcagaggcagatgtggcatgtctttttgtacccacagagcttgttctatggcacgcccttttctrggctttttgtatcatttcttagtacattgtaatagattcaaaccagtcttggctgaattaaagtgaggatgagagtcatttaggatggggagaagggagctggctgcagagatggagacactggctagttttgccctcacctttagggtggctagggtgggacaaattgtatcctggagacaggcttgaaggtaaaggctkygaggacctgaagccagwgaggcagagaaaccaagacagagaaaaaggcagcaggaccaggcgaggtggctcacacctgtaatcccagcactttgggaggctgaggcgggaggatcgcttgaacccaggagtttgagaccggcctggcaacagagtgaggcctgactctacaaaaagtcaaaaagtggggcaggaggattgcttgatcctgggaggtcgaggctgcaatggggtatcattgygccactgcattcccgcctgggagacgggagtgagaccctgtcagaagaagaaagaaaaaagaagaaggagagggagagggagagggaggagggggaggagggagaggagaggaagaagaagaagaagaggaggagaaggaagaaggagacagcagcgagatatcagagagaatatgcaagagatgaagggcactgcagagagatggaagcagggcaaagtgaggctaaggaacaagcactgacactaaatgacactccctatttgcacgctgttctgaatgcctcattaagtctccctatgaggcaaagccatgttttttgctttggtttgatttgggaggttttttttctttctttctttctttcttttttcgagacagagactcgctctgttgcccaggctggagtgcggtggcgcgatcttggctcactgaaacctctgcctccctggttcaagtgattctcctgcctcagcctcctgagtagctggaactacgggcatgtgccaccactcccgattaattttttgtatttttagtagagacagggttttactgtgttagataggatggtctcaatctcctgacctcgtgatccgcccacctcggcatcccaaagtgctgggattacaggtgtgagccactgtgcctggcctgtttgtttcttttataggcagggtctccctctgttgcctaggctggagtgcaatggcacaattcaaggctcactgcaaccttgaacttctgggttcagctgatcctcctgcttctgtttcagaccaccaaatagctgggactacaatcaccgtgcctggctaattttttttttttttttaatctttagtagagacagagtcttgcagtgttgcctaggctggtcttgaactcccgaactaaggcgatcctcccacccaaaaagcactgggattacaggcatgagccaccacacctggccacaaagcagtattattatcatgtttttacagatgagcaaactgaggctcagagaggtgaagtgagttgcccaaggtcacacagaaacaggcagagctgggatctaaattcagactctgaggctacagacactgcacttcttttcttttttcttcttctttcttttttttttttttttttcttccaagagaagctgtcactctgtctctcaggctgggatgcaatggcataatcacagctcactgcaatttcaacctcccaggctgaagagatccttccactttagctttctgagtagttgggactacaggctgcaccacaaccacacctggttaatttgtttttatttttattttttgagttattttttgagacagagtcttgctctgtcacccaggctggagtgcagtggctcaatctcagctcactgcaacctccacctcctaggttcaggcaatttttgtgcctcagcctcctgagcagctgggattacaggtgcccgccaccacacccagctacctttttttttttttttttttttgtatttttagtagagacagggtttcaccatgttggccaggctggtctcgaactcttgggctcaggagatccacccgcctcagcttcccaaagtgctgggattatgggcgtaagccactgcacccagctgctaatttttttatttttaatttttgtagaggcagtctcactatgttgcccaggctcgtctcgaactcctggcctcaagtgatcctctagcctcagcctcccaaagttctggacaacccgtgcacaccaccatgccctactcagacactgcacttctaactactaccttttaattcacaagtcagagacccagaaagaaagaggcagacacccttaaatacagagaagagcagagaaacacagacactaagatatgggaggcagggggaatcgagagagagaatggaaagaaacagagaaatgaccagagaaagacagatgagcaatgacagtgggagttccgaggactgaggctccctccctcaatccccagcccctcttttcttttttttcttttttcttttcttttttttttttttggacagaatcttgctctgttgcccaggctggagtgcagtggcatgatctcagctcactgcaacctccacctccagggctcaagtgattctcatgcctcagcctctcgagtagctgggattacaggcacgtaccactatgcccagctaatttttgtatttttagtagagatggggtttcaccatgttggccaggctcgtctcgaactactggcctcaagtgatctgcccacctcagcctcccaaagtgctgggattacaggcatgaaccactgcactaggccctcccaccctctcactgaaattctctgaaattctcccgtttggrgtgacgatagcaaccccaggcatgtaccctcccaacctgggacccgacctaataccctaacatcctgctgacagtggctgtttttgcggggcaggcgtcccaaagcacatcaagccagattcaagcagagtggaactggcccctcagccatcagtggaggtggcctgagaggctctaccctaaacggggtctccccaaggcgatgcagaaactgggacatgctctgctgagcatggggcttactggagtgaggcttataggcagtccccacatggggattaaggtgtcagctctttaatcccctcactgttcccatcacaggctgaccagagtcggccccagggcccagccagggacacagaggttgggggagagagggagacacagagagactcagaggtcctgagaaagacaggcagagagagatgatgcagaaaaacacctggagacactgaaaagagatggagaggaaaaggaagagacagataacgcagggatggcagagaaatcctggaaaacagagaccgggaggagaaagacagccactgagaaaagggaaagacagcgatgtccagagagaggaaagacaaagataaataaagagaacagaaatgaagagagatagagagacctgagagaaaaagaaaaagggaggaaaagaaagagagaaacagagaaatccagtctaattacaaagagatagaaacaccaaggcgggaggatcacttgagcccaggagtttgagaccagcctgggcaacataacgagacctggtctctataaatattttaaaaattagctaggcatggtggcacgcacctctagtcccagctacttgggaggctcaggtgggaggatcacttgagcccaggcagtcatggctgcagtgagctgtgatggtgccactgcactccagcctgggcaacagaacaagacagatggaagggaagggaagagaagagagaagaagaaagggaaaagaggggaggggagggaagaaagaggctgggcacggtggctcacgactgtgatcctagcactttaggaggctgaggcaggaggattgcttgagaccaagagttgaagaccaacctggccaacttaacaagaccccatctctataaaaaaacaaagagaggtagggaggaagaaaaattgggcattcattcaacaaacatttactaagtgcctactgctgtgctgagcgctattttaagtgctgggatacagaagcaaacaagacaaaatccttgctctggaagagctgacattccagaggacagcccacccgagcaaaatggaggaagagtcaggagctggggagaaaccagaggccataataaagaggatccattaaagcctgtcacagagggtgggtagggctgggggaggatgcggcttactgtgccccaccacactcccgctgtcagtggagtcagcagctctgagcaggggtcctgccccacaacccctgtcagtcaccaggttccagaaaggctgacaggtaggaagacccaggacagggcaggacagaatatggaggtacaagggggtcaacatgcagaaaggcaccctgaagaaataaggagaggcacagaagtgccaggctgagacaaagggaagcacagactgggggagatacagggagaggaagacacagacatactgaaaagagagacagaaaacagacacaaacagaggcagagactgagagaaaagagagagagatgggaaaagatggaaagaggagagagagagagatgaacacagaaacatagagactgagagcgagggaggctgggcacgctggttcatgcctatactcccagcactttgggagaccaaggcagaaagattgcttgagcccaggagttggagaccagcctgggaaacacagtgagaccctgtctcttcaaaaaatacaaaaattggcaggatgtggtggtgtgtacctgtggtcccagctactcgggaggctgaggtgggaggattgtttgatcccaggttgaggctgcagtgagccatgatcataccactgcactccagcctgggggacagaagccagactctgtctcaaaaaaagaaagaaaagaaaagaaggaaggaaaagaaagaaaagagagagagagcaagtgagactgagagatgaaacaaagagacacagagagaccctcccagagacaatgccagtcctaggctctgcacagtccccccccccccgcccactggctcgccaggtctgggccctgtgccaggcacttggaggaaggctggatttggccaagcaggggcaggcaggagggtggaccacattcctgaacagtctgttccaaatacagccccaacctcactcactgctgccaccaccgcaaccctggcccatccaggcctgagtctgccccctctagcccatgccctaggattgggggtagtgggggatagatgagagaataagggataagtttgtctgccatcatggcctggcctcagacaaggacttgggggactggataccagggggttcagcagcatgggcacagaacatttgggggcatctgggagccaatgccttgggaatagagatggtagattcagggcaggacataatatggaagtacaagggggtcaacatgcagaaagacaccctgaagaaatagaggcacagaagtgccaggctgatggacacccagaagccagggaaattgaaggcagatctggggaacaagcgtagcacacagggtcccaagagcaatggaagtgacaagggctcaggtgtgagctcctaggaatcacaggcacagagcacaggagtgccaggggtgtctttagaagtgtatttgagccaggagcagtggctcacacctgtaatcccagcactttgggaggccgaggcaggcggatcacctgaagtcatgagttcaaaatctgcctggccaacatggtgaaactccgtctctactaaaaatacaaaaattagcagggcctggtggtgcacgcctgtaatcgcagccacttgggaggctgaggcaggagaatcttgaacctggtaggcggaggttgcagtgagccgagatcgcaccactgcactccagcctgggcgacaagagcgaaactctgaaaaaaaaaagaaggagaagaaggagaagaagaaggaagaagaagaagaagaagtgtatttgagagtcggtgtgtatttaggaatcagaggtacagggtacagcgttcagggggcccagagatggcc

SEQ ID NO: 94427 - DNA, 38395 bp, Homo sapiens
  misc_feature (1)...(38395): n = A,T,C or G
ttgtgcacatgtaccctaaaatttaaagtataataaaaaaagtgggtgaagatatgaacagatacttctgaaaataagacatttatgcagccaacagacacatgaaaaaatgctcatcatcactggccatcagagaaacacaaattgaaaccacaatgagataccatctcacaccagttagaatggtgatcattaaaaagtcaggaaacaacaggtgctggagaggatgtggagaaataggaacacttttacactgttggtgggactgtaaactcgttcaaccattgtggaagacagtgtggtgattcctcagggatctagaacgagaaataccatttgacccagccatcccattactgggtatatacccaaaggattataaatcatgctgctataaagacacatgcacacctatgtttattgtggcactattcacaatagcaaagacttggaaccaacccaaatgtccatcaatgatagactggattaagaaaatatggcacatatacaccatggggagggatagcattaggagatatacctaatgtaaatgacgagttaatgggtgcagcacaccaacatggcgcatgtatacatatgtaacaaacctgcacgttgtgcacatgtaccctagaacttaaagtatatatataagaagaaatagagaaagtacatgctttctctatacacttacatgctgtatgtaagtgtcatacagaggtatgctctgtaagacacttacctcagcatatacagttaaaccctttttctatgtggttattgagaatttgactagtggtgttaattatgggtagccaccggtactgatcagtactttttgtttattcctatttttccaggaaccatttgttttacacattgttctctgtattactcatatttacccagagagaaaaatatatcactataatttgtaaaattcatatgtttaatggaaggagcaaaactgttctccasttattacaattatttttgaaacataaaaaaagttgtgaagatttcatcttaatatggacatttatctgttctcaaataatacttttataatttcttatgcctgtctttagtatcttaatcctgttatcttcagaagctaaggatgtgtgtcacctcaggacctctgtgataattgtgttaactgtacaaattgattgtaaaacatgtatgtttgaacaatatgaaatcagtgcaccttgaaaaagaacagaataatagtgatttttatggaacaagggaagacaaacataacgtctgactgcctgtggggtcaggcaaaaagagccatatttttcttctttctttcttcttgcagagggcctataaatggacgtgcaagtaggaaacatattgctaaattcttttcctagcaaagaatattaatattaataccctggtaaaagtatgcgttcctggggggaggtctataaatggctgctctgggaatgtctgccttgtacagttgagataaggaccgagataaaccttggtctcctgcagaaccctcatgcttactagggttgggaaaacttaaccctggtaaatttgtggtcagactggttgtctgctcttgaaccctgttttctgttatttaagatgtttatcaagacaatatgtgcaccgctgagcatagacgcttatcagtggttctgcttttgccctttgccttatgatctttgttggacccttatcagtggttctgcttttgccttttgtcctgtgatctttgttggacccttatcagtggttctgctttttgctctttgaagcatgtgatctttgtacctactctctgttcttacaccccctccccttttgaaacccttaataaaagcttgctggtctgagacgcaggtgagcatcatggtcctaccaatatgtgatgtcacccctggtggcccagatgtaaaattcctctctttgtactgtctctctttatttctcagctggccaacacttatggaaaatagaaagaacctatgttgaaatattgagggtgggttctcccaataataatacagacatgaaaaacatttgatggaaatccaacatccattcctgattaaaaattatcagcaagctagaaataaacagaatttcttaccctgactaaaggcatctacaaaaatatctgcagccaacatcatacttaaaggtgaaagacttgatgctttccctctaagattgggagcaagtaaagaatggcggttcttaccactctgattcaaaatcgcgctggaggttctatctattattccactctctaggtccatgtgtacacattgtgtagcacccacttacgaatgagaacatgtgatactttctgtgcctggcttatttcacttaagataatcacctccagttgtatccatgtggctataaaagacaagactttattcctttttatggctaaatagtattcaatggtgtatatataccacattttatttaaccattcatctgttgattccctatctttgctattgtaaataggatttggaccacatttcaagtacttaattagtggccacatgcagcaagttactaccatattggacaatgtagccccaacccactatatgaccttgggtaagacttgcaaactgtcactgcttcaatctctccatctataaaatggggatggcaacaatacctccctaaaagggtaaagactgagtcactgtgtgtaaagcacttcatgcctccccactggtgcttcaccctggggctggaatgagcacccaatcttagcgtcagatgacacagcacagcaggaccctggtccttgggtcagaaaagtccatgctggcacctctccagtgtcaggaaagtacagcttccacctcataaaaatcaggattgtttatcttatcctcctgggtcaaagtaacttctgggctcagggtaaacactgagtcactgtgtgtaaagcacttcacgcctccccactggtgcttcaccctggggctggaatgaggacccgatcttagtgtcagatgacacagcacagcaagacmcaggtcgttgggtcagaaaagtccatgctgcctcctctccccggtcaggaaagtacagcttccacctcttaaaagtcaggattgtttgcttctcctgggtcaaagtaacttctgggctcagggtaaacactgagtcactgtgtgtaaagcacttcacgcctccccatcggtgcttcacgctggggctggaatgaggactcaatcttagtgtcagatgacacagcacagcaagacccaggtccttgggttggacaggtctgtgctggcacctctccagggtcaggaaagcacagcttccacctcttaaaaatcaggactgtttgtcttctcctsctgggtcaaagtaacttcagggtcaggatcctggatccagcaaagagtttggttaacattgcaagaaagatgttgcctcatggtcaaaagtcaggcctaggatgagacaggcagacacggacacattcacatccaaattgtgcaaatatggactgaccctgtcagaggctgtgtgggtgcaggctcacagtgaagatagagacatatgggagtccagtagacatcaatcaaactggacccagtttccacacacatggagctcaagagtctccagggggaaaacagagacataaagttagagagagatagagccagagaaatttcctgcaccaggaagatagttgggaagaaccccctcagcgctagttagagtgatcagaaaccaaggggacccgatcactgcacctgccagtctcagtttctgtctccctccaactgaccacctcttcctctgagactcactggttctgcatttcttgcccctccttctgtttctcccatcacttccacctatggctgtcacagaaggactgataaaggaggggacactggagatagaccctgagcattgaaggcggccagcccccccacacctgtgggtatttctcatcaggttggacgagagactgagaaaagaaataagacacagagacaaagtatagagaaagaacagtgggcccaggggactagcgctcagcatacggaggacctgcactgacgccggcctctgagttcactcagtatttattgatcattatttttactatcttagtgaggggagtgtagcagggcaacaggttgggagaaggtcagcacagaaacatgtgagcaaaggaatctgtatcatgaataagttcaaggaaacgtactgtgcccrgatgtgcacacaggctagatttatgtttctctttacccaaacatcttagtttagcaaagagtaacagagcagtattgctgccagcatatctcgcttccagccaccgggtggttttctcttatctcaatagaatgaatgggaatggtcagctttacaccaagacattccattcccagggatgagcaggagacagaagccttcctcttatctcaactgcaaagaggcctccctctttcactactcctcctcagcacagaccctttatgggtattgggctgggggacagtcaggtctttcccttcccatgaggccatatctcaggctgtctcagtggggggaaaccttggacaatacccaggctttcttgggcagaggtccctgtggctttccgcagtgcattctgtccctggttaatcgagaatggagaatggtgatgacttttaccaggcatactgcaaacatattgttaacaaggcacatcccacacattcctaaatccattaaaccttgattcaatacagcacatgtttctgtgagcacagggttggggctaaagttacagcttaacgcatctcaaagcagaaacaatttttcttagtacagatcaaaatggagtttcttatatcttccttttctacatagacacagtaacaatctgatctctctttcttttccccacaagcgtctgcaggcttccaaagagaggggctaggagatgcaccaacacagaagcacaaatacaccagcacacacagatacacacaattggttcacatattgctaggttacagtttgctatgcgacaaaggcagtggaccagatttgattgaattgaacaattccttcttttcatcagcttctcaattttttttttgagacagagtattgctctgtcacccaggctagtgtgcagtggcataatcctggctcactgcagcctccacctcccaggttcaagtgactctcttgcctcagcctcccgagtagctggaattaaaggtgcccaccaccacgcccggctaatttttgtatttttagtagagacggggttttgccatgttggccaggctggtctcgaactcctaacctcaagtgatctgcccaccttagcttcccaaagtgctgggattacaggtgtgagccactgcacccagccagcctcccaattttgaacacacactaccaccacctccacaacacacaaatgtaaatgcactttcatatatgaaactgtataaatacaaggaagctccacacgtgcaaggatatacacataagcacccccagattcaaccacagaaacacacgcctgcacatttgcataaatacaaacaccactttacatataaaaatcatataagcacatacacggatgcaagcaagcatggagaaatgcacggaagcataaacaaacagacaaagctaagtaaaaaagtgtgcatgctcacctgtgcttacaaaaatacacatactcatacacaaacacccacacgttcacatgcttaggtggactttgatatctctaccactgtatccctgccaacatctagagagtggataagggataggcattaggtcgctgggttgcctaagcaggaagtctgggttccctaacacctttttctaagctaatgctccttgacgataatgagaaaggaggcggggaatggatgaagtttcataactgagtgaagaggcaggttcaggataaaaggcccagttagaggctgcagtggggtgcagggcagtcagactggaaccatggagctcagcgtcctcctcttccttgcactcctcacaggcctcttgctactcctggttcagcgtcaccctaactcccatggcaccctcccaccagggccccgccctctgccccttttggggaaccttctgcagatggacagaagaggcctactcaaatcctttctgagggtaagacacagacgaatggggtctgagggtgggctgcttcttgtctctgtacttggggatccttcaccaaacagaatgaggcagacttccagagtcaggggtggcacggggatggttggtgagtacagagcatagtgaagcatgatgggtggtagtattaggagaaaaacatcagtcaaattaaatttagcagagtttatttgagcaaagaagtgactcatgaatcggacaactccctaaaccaggagagacaccacacggcagtatgggcaagcagtattcacaggcagaaaaaggaggtgacatacagaaacagcctggctggccacagatcacagcttgccttacttggtcacagtctgaggagctagcagcctgtggtggactgaaagcccagctgctctgattagccaacatttggctacttgtcgcaagaatctattcatctgggccgggtgcagtggctcacgcctgtaatcccagcactttgggaggccaaggcggtggatcacctgaggtcgggagtttgagaccagcctcgccatcatggggaaactgtgtctctattaaaaatacaaaaattagctgggcatggtggtgtgtgcctgtaatcccagctacccaggaggctgaggcaggagaatcacttgaatccaggaggcgaaggttgcagtgagcagagatggtgccactgcactccagcctgggcgacagagcaagagtccatctcaaaaaaataaaaataaaaaaaagaagaatatactccctcccaagttaggttgcagttcactctatgcagagagaactttatgtcaaatttaatttaattaaacaattctccccttttgatgagcctcaaaattttgagattgaccaaaaccttgggcatcaacattacttctgtcaccatcataatggacttgtttgctctcagtatggaattcacaatggacaatgtcaaagtagttgagtgattctttgttttcttcatgtttttgttattcatactgtaatgaagccattggatgtacmaagaatggctgcatatgagcatttaagactctctctcttttttttttttttttgagacagggtctcactctgtcacccaggctggagtgctgtggcatgatcatgtctcactgcagcctttacctcccaaggctcaggtgatcctccgcctcagccccccgagtagctggaactataggtgcatgccaccacgcccagctactttttgtattttttgtagagacagggttttaccatgttgcccagactggtctcaaactcctgggctcaagcaatccacctgcctcggcctcccaaagtgctagccattgcacaggtgtgagccattgcacccggccaagactctcaagaaaatacaacacatcagggagactgttatgatggctctcaggagggtaatacaaagaaaatgaagtctgtaccttaccgggagtctccatgaaccaaactgatcaaaatcgaataattcaaagctcaggcaataaagatagttcaatagtattagagtccaattggtcatatactttgttcagagcacaatggtgattaaggacyagagcttgctataaaataacttgatttacagaggcatttgtttttgtagttcacctggtaacacatgtcatagtaccttggagacccactagaagaaacattaagagtagaaaaccttgtgataggcttgctgtattagtccattctcacagttataaagaaatacttgacactgggtaatttataaggaaaagggatgtaactgactcacagttccacatggctggggaggccccaggaaacttacaatcatggtagaagttgagggagaaggaggaaacttacattcatggtggaaggtgaaggagaagcaagtaccttcttcacaaggtggcaggagagagagagagagagagagccaagggggaagagcctcttataaaaccatcagatcttgtgagaactcactcactatcacaagaacagcatgggggaaactgcccccaggatccaattacctcctagcaggttcttccctccacatctgaggattacaattcaagatgagatttgggtgaggacacagaaccaaaccatatcacttgccatcaccattcaggatgcttgcaaatcaactgttacctgcacccgtaaatacatatcttctttttcccctgagaattttccttagtgtatttggtggcagtgtctagagaaacagcattgtcagccacattttaaattaagttatatgtactagtaaattcacgggaaagataagaacaatatttggttttgttcagcaccatacacaagcctccaagatgggcaaagaggagatctaaaactgcatgatgttccattaagcgtttttgtttaatacaatgttctcatcctccttttggagagtggcttctacccatctgaactccttggaggttcaattggctacataatccaagatgtcccttaatgtataaattagcctcagattccatacaactgtcaccccaatatcaccaaaagtgagcacccagggactccattggaaccttttctctgcagaaaccaacttatcttcatcgactttgaggttgatagtaatttcagttattgactgttttggcttttaactgtgggaggtattagggaactctcaaggaaaaaatttggaaagcagcagtgagctaggccaaatagcaagttacgggccagtgaggagaaagaacagagtaagcgaacctcagcagacccaaggtaggcacttgtggggttggaaaagagggtcacctactggcattagagcagatatcagttaaatttgtttacacataagtctgcacagctcttgaacaaggtgggaagctcactttttttgtggtctctttctatcatgctgcaagggtgcatagccacatttagttggaaagagactttactgtatttacttatttatttatttaattattttttatagcgttggggtcttgctatgttgaccaggctggtctcgaactcctggcctcaagtgatcctcccatctaaatctcccaaagtgctgggattacaagcacgagccatcatgcctggccactttaccatatttaattcagtaacattacacatgcaattaaccgtacccacataggtagtccccaggtcctatgcgggatgcctggaagcacaatatgctttttgcagccatcattcagatacattttctatatttggtagtgattatattattagttagttaatagaatgttattacatactgttattgtattatattaactaataactagttattagttaatagtatgttattacatactgttattatattaaataactaataacataaccactatcaaatatttccagtgagtgcaaaaaagcaagtggcaattgatgtctagaatatcaagatatagctttccackcctcctttggggtttccgggtgattcccattgggaacacaaagaggcattggcgccagtgaaattatttcctgattttggggaactggctcacaaactcaacaattgcttgtyttttttcctagggtataagcctttgctaaagccattcacagattattgtactatggattttcttgtaaggaaagggaaagggttaggacagcaagaaacagggaagaaaggataaragataatgctttcatgatggaagagaaatcttgatccacagtcttggaaaagctgtccdcatataagatgccaactgcttcttgggaaaaactttcctggtcagctttgccttaaggtctcaacagacataaagttctaggagtctagaaggacccttttcaattgagagatgtggatccaagatcccagaccctgaagttttgctacagagaagaacttggcattgtcctttgcaatggagtacaaggacagtcttagaagaacctggtatggttacttccaatggagttcaaggacagtttctctggtgtcatttccaaagagcccaacctctaaattatagatagtgaaaggtctggttgtcatcaactgatgggtcatcaatgactccttttacctggtgaaaacatgccttggcataatgtattaaagccttgcattattgaatcatatcagagtttataagagtgggagatacatgagattctattattggggcataggacttcctattactattttacaagtgatctatctatgtctttccaataggagtggatctgattgccgtcaatcaataatacctttgaccaagggactccaatcaattcagcatgctttgcctaatgccttttgtttgtaatactgttgcgggacaatcaaagactggagagaccaaaaaaggttcaggagagtttattaaattaaggtgaccactggctcagccagaaatatgtccagagagtctgagccccgaacaaagggctttgcctgcttttaaacatcttaaggtgggaactacatgaggtgggaagcaagttacagaagggagaaacaaagcagttaattaacatttcttacatcttaagaaagacatgtgttgcaacctaaacttatcagtcttatgaccctgcagccatgcaggaactcactgggcctgtaataaactttaaggaatgtggagttgggaagaagagataaggtccattgtccacagagagaagaaaggttgttaatattctcttttaacttgaatgtaaggtgggggtcacactttgcagcaactttaaaaggattttaaaatttctattactactactattaggttatagttgatttcattaattccttcttcaataccttatttaagtattttaccacttctctagtgaagcaagtacctctaccactggagagttctccaggaatgccaagtaaggaaatacattttctaataacattttagctactgttatggcattgatctttgtgcataaaaaagctttaatacaaccagaaaacatgcaatgaaggtggcagttgaattaactccatcttcaagtgttcaaatgatctaccaagtcccagaaatatatcacctgtggtttttggtttttgttgtcttactagaattatggatttgataaatcaaatattagttataaaccattagaacagtcacctcatcaatattttttcataatttggatcattttatctcttctatgatgagtcgtggaatgcagagcttttagtaatggaaattttaagaactcaggaaggatcaggcggccatccagtgtctccatgagtgcatgcttcacactggaattacagcctcttaaatacaaattttaataccataagtaccaatttatgcttctccaattcaggtacataacactggtttattaaataggttatcataggtaatttgatggtgccattgcactccagcctgggtaacagattgagaccctgtctctgaattggaactgcacgggggcactgtccttggaggggtgagtgggcatgacgaggtgtctgggtatgagccacaggtgtagaatttcactcttctctgccatcctctgttacatcctgggtacctgcctgccactgaaagaatgaggtaaaagaggtggtggcacgaatcaaatagattttgctgtgccaatgagagagagcagactagcccatgtcagtgccaggagagtggaggagagagggagagcagcaaaggagtgtgggtagggagtgctcatcaacagtacacatagtgccctataccggtaactgccactggctcagtatttacctgggttatcactgcttaccatgcctgattttatgattaattatctacttatcattactaatcaatcaacccactttccaatgggagaattagaatactgacaataccttccccttccccctctcatgttgaccatactcctgaatcttaggcttgttatccttttgctattaatagagtttttttatttctgatcaatggtctttttactgatagagtaaatatgcatatatacagagtatatatgccaatggtactatgaattttaaaattatttgcttagacagaatatgtggacatacaaatgatgaatgtgataattgtcatacatatatatttatcttagacacttagtcaaaacatgtggtttttggttatgagttagacactgtcactttasctggaagatacaaagtaattgggtcatagactctcaaattatggaacacttagatttttcaggggaatgacatggagggagccaaggagtcttatgattaggtaaaatattgtttgggtggctcacgaccccactgggcaacactcaaagatgtggtggcttatgcctgtaatcccaacactttgggaggctgaggtgggaggattgcttgaagccaggagttcaaaaccagcctgggsaactgaacaagaccctgtctccacaaaaattttttaaaaatttagccaggcatggtggcctgtgcctgtagtcccagctacttgggagactgaagcaggaggatcacatgagccccgcagtttgaggttgcagtgagctatgatcacgtcactgcactccagcctgggcaacagagcaagaccctgtctcttaaaaaaaaaatcatctgcagtgtgaggagtgacaacatttaggaaagtgtgcataggtttaaattctggtcaaagacatcctacacaattcactgaaccttctctttaagggttttttctaaactctgcagacactatctggagaccaatcatgcctctattaacagaatttgctgctccttctagctcttggtatctcactgccccctttctttatgagagctggcatggtcattgaatatcccaatcctttacaaattctgaaacaagcaaaactgtcaatgaaattcatatttgcctaaaatgagttttcaaaaggatctttgtggctatcttgttagttcatagaaagtggaggcttgtcaggaacgatattgaatttttcatttaaattgttttagagacagggtctcagtctgttacccaggctggagtgcaatggcacagtsatagctcactgcarccttgaactcctgggctcaggagattctcccgccttagcctccagagtagctgggactacaggtgtgaacgaccatgccccactatttttttttatttttgtagagacgtgttgggggagggtctcactatattgccttggctggtcttgaactcctggcctcaagcaatcctcctgcctcaacatcccaaagcattgggataagttttgaatagacatgtttgaccctctccccttcttcgttgcagcaaagatttccattttctcacagggaggrcttggggtaaatwgtttgttttgttgttgttgttgttgtttgaggatgtgggtgggtcatcttggttaatgtcagtgcaagaacagtgtccgttcctcattattggggttccttagccatccaggcaagcagtagctcccttgagaagacttcctgacccccaggtccccaccataggctctcatacaccagctgcccctccttactgagcctatgtccttgacaatgctgcatttacttgtgatcctgtggctgatctctccctcacacttccagacaaggaaggcctgcgaggactcaccacagagctgaacatagtgcctggtacacaataggcgtttagcaaatatgtgtatagaaacaaatgaaggagtcagtgagtgaaagctccaagcctgactcagcagaactgacagtcggccrgggcctgcaaagtgctaccaggcccccagtagggggtcgcagatctaaggatccctccccaccaaatagagtcccatcacataggtgaaggtctcaagtgcctattgttttcttttcatcattttccatgtgtcacgagaatatcatgctatcatgtgaatcaatggacttagttttcccactagagtaatgtgtctgggaattacctgtgttgtcatggggattttctaggtgtcatttacaactacctgtggacaaggtgaggtgctaccctcatcttagaagtagggatggtggccgggcatggtgactcatgcctgtaatctcagcactttaggaggctgaggcaggcagatcaactgaggtcaggagttcgagaccagcctaactaacatggagaaaccctatctgtactaaaaaaacacaaaactagctggtgtggtggcacatgtctgtaatcccagccactcaggaggctgaggcaggagaattgcttgaacacaggaagcggaagttgccctgagccgagattgcaccattgcactccatcctggtcaacaagagtgaaattctgtctcaaaaaacaacaacaacacaacaacagcaataacaaaaaaacagtagggatggagatgctcagcctggggaaagcacttgtccagtggcacacaactaggaaaaggagaagctgagctccagcaggaggtctgtctccaaagccctcctagactaaagctgcttaacattttgtggattatgaaatcctctgagagtttgattaaagctgtggccccctcttttccaaataggcacatacatgtttgcataaagttgtgaggcttcacagactccctaaaactctttcataaaccttccaagggtcctctaggtattcatgaccgtctattatgattgcatctcttgggggtaggggaaagagggagggcatgagcaagtgtgtgtcaaggctgaggaaggtggygctgttgcttctccatttcccaataagcttccagattccttttggagccagagggatgcgggctcgtgtctcagattcaattcttatgcgttgagtcacagttttctcttctgtcaattaagaccatgacaatgagaatgtgtgcccctaaggtggttgtgagaattaaatgggatattgcatgcagctagtatataataagtgctcattaaatggcaactaccttgatccactcattcatttattcatgaatccaataacaattcactgggcactttctatgtaccaggaaatattctatgaattgatgatgtggcatcttggacaagacatacgaggtaacactgtgcttatggacattccattggtggagacagataagcaaaaaataaacagataaggaaatgttaggtggacaagagctacgattaaactaaagcaggaggatatttcagaaagtgatggagaactacattagattgagtggttagggaaagactccgccttgctttgtttcttagcagggaccaggaaagattcaggtggaaggtgccagaaggaggcagggtggttgcaagaatcctgaagcaggaaaaatctcagggaacaacatggaggaatcagtgggaggagaagtcagagaggtgatggggccacatcatgtaggaccatgtcaaccacaggtggagacttcagatcttattctcagcaaagttggagtattggaggccttggtgagcacagggatattaattattttacattttagtggggttaccctggcttgtggggcagtgaaacagttgttaaggggtctaagaatgtaaggcaggagaccagtgaaggggctttgcagagatcaatgcagggcatttgtaagtaaacttaaacrtttttctaatttttatgtcaagtttttattgaaattgaacatcactataaaaagtgcacagctcaatgaattttcacaaactgaacatactcatgtaattgacatgcaggccaagtagcaagagtcccccaaaacaccacaccccgtccttttctagtcactatccacctaccatcttgatcatgggttgattttgtctgtgtttgaacttttttttcttttttgtgagatggagtcttgctctgtcacccaggctggagtgcagcagcgtgatctcggctcactgcaacctccacttccccacgctcaaggaattctcttgtctcagcctcccgagtagctgggactacaggtgagggccaccacgccagactaatttttgtatttttagtagagacggggtttcaccatgttggtcaggctggactcaaactcctgacctcgtgatcagcccgtctcagcctcccaaagtgctgggattacaggtgtgagtcaccatgcccggccctgtgtttgaacttcatacacataaaattatgatgcatggactctcttgtgtctagttgcttccactcaacattatgcctgtgagtttcagccacgttattgcatgtagctgtagtttgttctttttcgttgctgtatactattctattgtgtgaactctcactgtttctctatatctgtgttgatgagtattttataaagaaagcttctgtgaatatttgttcattttttggtgaacacacatacacatttgtgctgggcatgtacctgagagtgaagtggatggtttcccagttatccatttgttcagcttcaggaaatactgcccagcggttccccaartggctgcacagtaatcccaccttatccaccggagatatgttctgagacccccagtggatgcctgaaaccccaaataatgctgagccctatatatactctttttttcctatacaatcacattatacagggagggtggtatacacagtgcagacggggtggacaaagggatgattcatgtcctgggtgggacagagtggatgatgagagacatcatcatcctacttagaatggtgcacaacttaaaacttacaaattgcttatttctggaattttctatttaatattttcagactgtggttagctgcaggtaactgaaactgcaaaaagcaaaaccaggccaggcgcggtggctcacgcctgtaatcccaacactttgggaggctgcggtgggtggatcacgaggtcaggagatcgagaccatcctggctaacgtggtgaaaccctgtctctactgaaaatacaaaaaatcagtcaggcatagtggcaggtgcctgtagtcccagctactcggaaggctgaggcaggagaatggtgtgaacccgggaggcggagcttgcagtgagccgagactgcaccactgcactccagcctgggcgacagaccgagactccgtctcaaaaaaaaaaaaaaaaaaaaaaaaaaaaagcaaaagcaaaaccacagatcataagaagtatggggtgagggtgatattcgtagtattttatcaaccatctctactgtttagggcagcagccaattagagcagaccctggctgggccaccaattaacctaagcttgtccaacccaccttattttgttgttgttgttctgttttgttttgtttcagtctttcagcagcctgaagccatggttttcagattttgtctctagtaatatacagaaaagaaggatgaggaaggggttttactggcccaatcagaaacagaaactaagaacctatgactgtattctctcccttggacaccgttaactgttaacccttacttgctggatcctggcaggggaaagggcagcctggggaggcggatgttgaggaggggctaattaccaatctggtatgtaagtattttgatagttttacaaatgaggtgtatgctgactaacagccacccctggtgtggatgtgattggcagttccgagagaaatatggggacgtcttcacggtacacctgggaccgaggcccgtggtcatgctgtgtggagtagaggccatacgggaggccctggtggacaacgctgaggccttctctggccggggaaaaatcgtcatcatggacccagtctaccagggatatgrtgagggcttcagaggcactgggagggggcagstgggggtgcatcagggaagggagtatatggggggaagaaggactcagagccttcttccaacttcttctgcaaccaactcacacctcccctgcactgcaggcatgctctttgccaatggaaaccgctggaaggtgcttcggcgattctctgtgacyaccatgagggacttcgggatgggaaagcggagtgtggaggagcggattcaggaygaggctcagtgtctgatagaggaacttcggaaatccaagggtgagtcctgggagacgaataggaaagaaaggcaatgaaacactgagagatgcaggcacgggaatagaaaggcagagaggtatacatgggcagagacagagacagacgaaaccagagacatgatctgacagaggtatagggacagagagtgagagagacaggggaatagagagggacggggattggcaggagagaaacagagccagggaaagagagagatgccaggtgtataatgtccaaaagttactcaaagaggctggatgcgatgactctcacctgtaatcccagtactttgggaagcaaacagcctgggcaacataatgagatcctgtctctacacaatataaaaaagaaatgagccaggcatggtggtgtgtgcccgtagtcccagctacttgctatggtgggactacaggatcacttgagcccaggaggttgaggctgcagtgagctgtgattgtgccactgcactccagcctggacaacagagcaagatcctgtctcagacaaacaaacaaagaaacaaacaaaccctgaaagacatatattttcatggatcaattgtgtctatcgaaggcaaaatcagaagttatgtaaaagaaagcaaagagataaaggaaaaaactacagacatttaacaaataatgacctgtgttttccttgccctgggtgaagtgctgatgagctggcagtgagcaagcaggccaggtgggatgttctgccygggtgcagctggaggggtcatcaaagaatcactaggttatttttgagttctccataactgggtgtctgtgggacatgtaggtgacgggtctctggctagtacctccatctcatttatgccaggtgtttaccatctctcttatcaaaatttctcaagagactctgggacgtaaatgcagaggctgcgtggggaggtagaaacacaggagctataggcaaacagggacaagaagactgaagagaaggacaggaagaaacagagtgacacaggcaggaggaaagagacagatggagggaccaaaacaaagagatatatagactgggcatggggctcatgcctgtaatcccagcactttgggaggttgaggctggtggaacacctgaggtcaggagttcaagaccagcctggccaacctggtgaaaccctgtctctactaaacatacaaaactagccacgcatggtggcacgtgcctgtaatcccacctactcaggaggctgagactggagaattgattgaccctgggaaatggaggttgccatgagctgagatcatgccactgcactccagcctgggtgacagagtgagactgtgtctcaaaaaaaaaaaaaaaaaaaaaaagagagagagaaatatacacacagagagacagaaagaaacaaaggcaaagagaaattgaggcagaaaaaattagaggagagacagacagacaaggctcaagaaagggtctgcagaggaatgagagaagacaggcaagtgagacccagagagaggctgcactaacctgacattcttgggtgctcacagaccaccctccctccagctggggccagtgctgagcctggtgtatacaggtatcacttaacaagtgcagaataatgcccggatgactggagagccctagatgtagaaagaagagattatgggggagtaacaggtgggggtagaaagatggttttttatttgttttaaattagggacagggtctcactctgtacccaggctggagtgcagtggcacgatcatagctcactgcagcctcaaactcctgggcccatgtgatcctcccacttcagccccctagactccttcaactgggactacaggcatgtgccaccatgtctggctacatttttaacttttttgtagagacaggttctccttatggtgcccaggctggtcttgaattcctgatccttttgcctcaggctcccaaagtgctgggattagaggtatgagccactgtgcccacccagggctttttaatttatacaarcaattgattaaacacctactctgcccagcccctacccctgggatttagctgtattcactcccagagtcagaggtggggccggagaggaggtgcagagtgagaaccggctgcatggactcgatagctgtgttgcctgggtctaaatcctggcctcaggaatgagtagctgtgcaactttggtcaaattactcaacctctctgtctgcccatctataatttggagctaataatcaaattgcatctgcctcacattgttgtagtgagagttcagtggaattacrygtgacgtgctgrtacataattagctgttatggttattctcatgtttaccattactgagtgatggcagacaatcacacagagataggtgacagcctgatgttccccaggcccttcagtctgtgtccttgacctgctgcttcttcctaggrgccctcgtggaccccaccttcctcttccattccattaccgccaasatcatctgctccatcatctttggaaaacgcttccactaccaagatcaagagttcctgaagacgctgaacttgttctgccagagtttcttactcatcagctctatatccagccaggtccaggagagggagaaggagagggagggtgggggtgaggtgaacatccaggacacacgagaaaaggatgacctgacttgggggytcagaaatgcagcttatccctggaagaaatgcagagaccacgtggagtcagggacatggagacctggagggaggggaggcggtgagacagggatagagacagtgagagagagaatggggcacgatggggaggcagaaacagagtcagagagagactgagagaagaaagatgagcaaaaacaagacaaagaagggcagagatcaagagatcctgagagacagagttgatgagaatgaatgtgaaagagagggagagagagaatgaatcaggctttgggcttgatctctgctcttctgctcctggatgtctttttttttttttttttttttttgagacggagtctcgctctctcagccaggctggggtggagtggtgccatcttggcttactgcaacctccatctcctgggttcaagtgattctcctgcctcagcctcccgagtagctgggactgcaggcatgtgccaccacatctggctaagattttttttttttttttttttgagatggaatcttgctctgttgcccaggctggagtgcagtggtgcaatctcggctcactgcaacctccacctccctggttcaagcaattcccctgcctcagcctcctgagtagctgggattacaggcacctgccaccacgcctagctaatttttttgtatttttagtagagacagggtttygccatgttggccaggttggtcttgaactcctgacctcaagtgatctgcccgccttggcctcccaaagtgctggaattacaggcatgagccactatgtccagcctactcctggttcttctgtatgcttgcttctctgtctttggtaaagctcctcacctgaagaaattcaaggatacaagacaataaggaacagcatttcttcattttctcccattgctccttctccctgttttttttttttttwaaaaaaaaaactttccacagattataaaggtaatcttctgctcttttaaaagaaaataataaaatgtctccttattgattaacctggaaatatgcctattacatattaaatttaagaatatcaagctgcagaacagtatgcatagctgtagtttgttgttgttgttttcagacagtatcttgctctgttactcaggctggagtgcagtagtgtgatctcaactccctgccacctccacctcccaggttcaagcaattctcatggctcagcctcccgagtagctgggactataggcgagcgccaccacacccagctaatttttttgtatttttagtagagatggtgtttcaccatgtcggccaggctggtcaacatagctacagctcttaagcaggggtgtatgttggattcacatgtggggttgtcacagttatggattttcaggaccctactttccaggcggtctgatctggaaagtctgggatggggtccaaggtgagtacttgtaacaagcccgaccaataattctaatgttctcctcccaccgagaaccacagagaaaagtctggaaggagacccaccagacagttaacaatggttatctctagaaggagagattaagaaggaattttacatcgcaatatacgtttgcatttttgcaattatttgcaataaattaggcattccattcttcatcaaagtaatagaaataacctccaaaatacatagtcctaacatgtcagcaggcttatcttgtgtaagaatcattttattaatgtctgacacagcaagggagatgaggagaggagggaagagggagagaaaagtatgagaaagacaaataaacaggccgaggtagacaatgggtgacacagaaaggaagtgagacagagactaagagagatagaaaggagagaggcagggagatggggcagaggccaagaaaaagacagaaggatgagggaggaagatgcagaaagaggtaaatgtgagatagatcaaaggagatatagagtcagtgagtgaggggttcagaggcagaggggagtggggaagtggggttcccatggagggattggggcccaggaggsgctctctccctgtgacctgctagctcagccctaggcaaacctcaccaccccttctttcttgcagctgtttgagctcttctctggcttcttgaaatactttcctggggcacacaggcaagtttacaaaaacctacaggaaatcaatgcttacattggccacagtgtggagaagcaccgtgaaaccctggaccccagcgcccccagggacctcatcgacacctacctgctccacatggaaaaagtggggtctgggagaggaaaaagggaagggaggggagggagggcaagatrgagaggtgagaagagggagggaaaaggggtagggaaggggaagatggggagtgaagaasaaagattagggaggggagaatagtgaaaaggaggagagcagatgaggaaggaaagaaagatgaggtgaaaggaaggagaaaataggaggaactgagatggagagagagtggtggtgggaagtgggggagagagagagagggagagagaagactggctgaggaaggaatttggggcaagagacaaaaatacagcaacaggagaaaagactcacggaggtagaaagagactgggagacaaaaagagagaaacacatcaaaaagatgtggagagagatagaaacagagccaggcagagtaaaaagaggctgagagagatgagttagagatgtgcagctggacatgtagaggacagagaaaagcaaattgggccagataatgtcaaagaccttcaggcaaacggagggcagccagggagacaggcgtgtgcacagcaaggctacarcctctcctgaccctgccctcccctccctactgtggacgcaggagaaatccaacccacacagtgaattcagccaccagaacctcatcatcaacacgctctcgctcttctttgctggcactgagaccaccagcaccactctccgctacggcttcctgctcatgctcaaataccctcatgtcgcaggtgggccagggacagccagtcaagggggtcttctggactgsagaaatggggctatgggtaccacctggatgagagaggggatgctggcttcctrttccgggatcactgtaggctctggactagcttccaatcaagccaattctgttggtggatgcatggacgcatgaagaatctgtccatgcgttctcccattgttttcttccatcactcaaggatcttttttttttttttaagacagagtcttgctctgtcacccaggctggagtgcagtggcgcgatcttggctcactgcaagctccacttccaggtttcatgccattctcctgcctcagcttcctgagtagctgggactgcaggcgcccgccgccacacccggctatttttttgtatttttagtagggatggggtttcaccatgttagccaggatggtctcgatctcctgatcttgtgatgtacaaatttagggagtacatatgcagttttgttatgtgygtaggttttgtaatggtcaagttagggccgttagggtatttatcacccgaacagtgtacattgtacccattaagtaatttctcatcattcacctcccccttctgctccctcgctcttcttagtcttcactgtctgttgttcctctctctgtgtccatgtgtacacattttgtagcactcacttatgagtgagaacatggaatatttgactttctgtgccatgacttaaaaattgatccgttcatccacttatcttttcatctattctttgtttaatttattaattaaagaatgtgtactcactgattttttcatttatgattcatccaaggacatatactgtgtcattcatttatttggattacttgatccacaagttgatcctttgaaacagtgatatgttgatggacaatttgtcattgattcattggttcatttattcattcattcatgcattcttccatccttctatgaactaggtttcacccttatccttccatcagtcagtctttcaattcacccttaatccatccatgctttccttcatttatcacaataattcactcatttattcacctctgatctatttatcattcaatccagccattcatttattcctttatttactcatacttcactaatttacttattcacttgttcttccataaatctagccattcatgtgattattcattaattgggttcattgatttctttgtctatggaccattcattagtgattaattaatcaatcaatccatctattaattggtaagtaaatatatacatccatttattggtttgttcatttcttcatcaatctttccttccatgaattgatctattgattgattgattgatgtttttatccagttgttcatggattcatctattgttctattacactgttatatacctgaggaccaagaatagtgtctcacctataatatacacacaataaatattagtttattttctactcatcttagagagggtgttytgatttgtggcctggagttcttaatctgaaattccatgcaaaatcgtgttatgtgtgtgcatatgtgtgtgtgtacctgtgcatgtgggaagaggatccataatagtcattagatttcaagcagtgagaattcttgttgcttccttcctgctctcctcaccccacgctgattgctttgaggagtatcaaagatctaagcctttactgtaggtttttaattggtcaatagaaagtagtgtccctgctgaaaggtctctttttaaaaaattttctttccttcttttttcttttttttaattttgagacagagtcttgctcygtcacccaggctggagtgcagtggcatgatctcagctcactgcaacctccacctcctgggttcaagcgattctcctgcctcagcctcctgagtagctaggactacaggcttgcaccaccacacccagctaattttttgtatttttagtagagatgggattttgccatgttggccaggctcatcttgaactcctgaactcaagcaacctgcccacctcagtctcccaaaatgctgggattacaggtgtgagccaccatgcctggcctcaaatgcctctttaaaatgagattcattcatcttcttctctgtgcagagagagtctacaaggagattgaacaggtggttggcccacatcgccctccagcgcttgatgaccgagccaaaatgccatacacagaggcagtcatccgtgagattcagagatttgctgaccttctccccatgggtgtgccccacattgtcacccaacacaccagcttcygagggtacaccatccccaaggtaagactggctgcacccccacatccctcctgtgtgggcatcctggattttcttaatccccaaactcaaccttttgttagcttctcaattgagtccccttgtttttgtttttttctttttcttttttgtgctgtgtgtgtggagggtgggcagggaatggcaatatcttttgatcttgtgatcctycctcaggacacggaagtatttctcatcctgagcactgctctccgtgacccacactactttgaaaaaccagacgccttcaatcctgaccactttctggatgccaatggggcactgaaaaagaatgaagcttttatccccttctccttaggtaagctggacccacagtttctttcccagacaccagagggcaggtcctatcctcaacttgagaaaaaaaatgacaggtccttattaattgagcacttaatatattccaattgcttcacctgccttatccccttccatcttcactacaaccctgtaaggaggcttgagaaagaagatgacattcccaaaggcacatctgggcaagcaggaacttgggcaagtattttaacatctctaaacctcagtgaattcattttcttaaaaagaaaaaaatctgttgagcaccgctgtaagcccagtgctgtactaggggctgaagacaatgcatcaaacaggtcacacggagacagggttcctgccccaggaaatttaaagtccagcagggaagatggacattcatcaaataataataaaataatcatctcatgaaatgaatgaatgcctgcaacatgcttggaactgcctggcacaaaggacatgctcacaggggcaattattattataattagacataattatgataagtgctctaaaggganctttgggagcacaaaataggaaatasnagctaatcttgtggtgggtcattaaggaaaagcttaccagaggaactggcttccaagccgagatgttcatgggtgggcgtcaatcaatgattgcaaagtgtgttccaggcaaaggaaacagcaagggcaaaggctaaaggtggaaatgtgatggtaccattgagaatctataggaagtccagtgagccttgggtgtagattgcggaagggaataagacaaagggctcagctgggcaggaccttgaaggctgtggraggagtttggatttatggtctagcactggggaggtggagaaggtcttgacgtgctctgacttgtcccagttctcatcctccactctttggctggttaagagaaaaactttaggcaaattaaacttagcagagtctatttgagcaaagaaacaattcatgaattgggcagcacacggaaccaggaaaggttcagagagctccacccagcaatgtgatcaggcactatttatccayagggaaaggaactgaggtacagaaacagcctgattggttacagctctgtgtttgccttatctgagcatgtctgggcagcttgyagcctgtgactggctgaagcttggctgccctgattgtccaaggttacttgttacaagaatatactctcaagttacattgcagtttgtttacatgttgagttacgttacagtttgttatgcagggaggctgctttaggccaaatttaatttaatttaacacgcaccatccatgaaaggccccagaaacaaatccctagtcttgagtttcatcagtgacttcagcaacccagggtcctggcccagcccctggttttgtgcagtacagtgacctccttccacattttatcttcaatgacagttaggaacacatggggtgatggcttgagggtcaatgtcttctctcaattttgctgtcttgtttttttttttttttccttttttgagacaccgtctcgttctatcacccaggctggagtgcagtggcacaatctcagctcactgcaagctctgcttcctgggttcatgccatcctcctgcctcagcctcctgagtagctgggagtataggcacctgccaccatgcccggctaattttttgtgttttttagtagagacagggtttcaccgtgttagccagaatagtcttgatctcctgatctcgcgatccacccgcctcagcctcccaaagtgctggaattacaggcgtgagccaccatgcctgagacattatcttaaggtttctttttttttttttcttcagacagggtcttgctctgttgccctggctggagtgcagtgtcatgatctcaggtcactgcaacctctgcctcccaggttcaagcgattctcctgcctcagcctcccaggtacctgggactacaggtgtgtaccaccatgcctggctaattttttgtgtttttagtagagatggggtttcaccatgttagccaggatggtcctgatcttctgacctggtgatattccttcctcagtctctcaaagtgctgggattacaagcgtgagccattgtgacaggcctgctattttgttttaagagaggcagagatgtagggaaataaggacagagacagataagtaacaaagataataagattgagaaacatagttggggacaaagagggaacacactgagagatagagatggggagacagtggcagaaggacagacagcaggtgaacatcaggcagtatacggagaggaagagagagagacacacacagagagagccacataaggagaagaggaggaggaggaataagaggagagggaggaggaaaaggaaggcggaggggagaaggaaggagggaaaggagagaaacagaataagagataggaaaaagagagagtgacacaagaagagaggaagaaagaatgaaggagacaaataaggtatctttagagrgagatgaaaagaaagaaggagagagagagagattggggagcaatcagattcaaatagatggagataggaggttaagcaagatggaagaaagccaaaaaaggagaggaaaagaagaaaaactgtgtctgacaggtatagacagagaaaaagacaggagtagggctgccaggggcagaaagaaaggtataacccaagccaaaagggtactgcagccaaagaaattcgaaaggtgtccaaacagayggccccagagatggggagggcgtgatgagagggagataataagcatcaggctgttgtggaaaatgttaggtcacacaaagagttacagaagaacaggcccagagacctgcctgtttctaagctcatgttgcccaacttctggatgtgccaaagggacatggacccatttccagacacctccacatagacacacttgtccaacaacttggcaggcatagggaatgcctgaaaactcacacttgacatggcctttccaaggtttgcagattatgaaacactgaagtgaagggaaargctccctttgtctctgcctcagctttttccagctccctttgttctcatttttctcccaatctgtggtttagaacctactgggggttccttgcacctctgagaatcggtggaagccatagaccctccctgtctcatatgcatcagtcccattcacaatttatatacaatttgggttttttaccccctgagctcttgaagcctgtggatctcaggctgagaccagaaaacagcctagagacacagacacagacacatggccagaaacacataccccacagatacccccagaaacaaacacaaggcgataaccaaaccttaaggctccttagcagaagccaagtgctgttctaagaatttttacaattgtctcctttaacctcagaagagccctttgagagaggtgccattctccccgtatgagaagtgaacactaagaatgttgtcataaatgtgctcacacacatgtagaggtacacacacacacacacacaaccagaagtgggtcattatacactgtggggatcaccaaaccctttggaactgtaacagaagctacaaactctctactagaaaaatgaacatggcgccgggcgcggtggcccacgcctgtaatcccagcactttgggaggccaaggtgggtggattacctgaggtcaggagttcgagaccagcttggccaacatagtgaaaccccatgtctactaaaaatacaagaaattagccaggcgtgggggcaggtgcctgtaatcccatctacttgggaggctgaggcatgagaatcgtttcaacaccctgagaggcagaggtcgcagtgagccgagatgtcgccgctgtgctccagcctgggtgaccgagagagattccatctcaaaaataaataaataaatacataaataaataaataaataaataaagagattgagagagagagagtgagagcgagagcgagagcgagagagagagaaatgaacatggcacatccattcaaagatttgcacctggtttcagagcagcttcctaaaagtccaccctgaattgtaggttaaaggccagtcttatgcaaatctcttgcagtggacatacatgtctgggcttagggacatggcagagcgaagtgtatgcacctgccctgtgcccatgctggtgaccttctgtgyccacagggaagcggatttgtcttggtgaaggcattgcccgtgcggaattgttcctcttcttcaccaccatcctccagaacttctccgtggccagccccgtggctcctgaagacatcgatctgacaccccaggagtgtggtgtgggcaaaatacccccaacataccagatctgcttcctgccccgctgaaggggctgagggaagggggtcaaaggattccagggtcattcagtgtccccacctctgtagataatggctctgactccctgcaacttcctgcctctgagagacctgctgcaagccagcttccttcccttccatggcaccagttgtctgaggtcgcagtgcaaatgagtggaggagtgagattattgaaaattataatatacaaaattatatatatatattttgagacagagtctcactcagttgcccaggctggagtgcagtggcgtgatctcggctcactgcaacctccacccccggggttcaagaaattctcctgcctcagcctccctagtagctgggattacaggtgtgtgctaccatgcctggctaatttttgtatttttagtagagatggggtttcaccgtgttggccaggctgatctcaaactcctgaactcaagtgattcacccaccttagcctcccaaagtgctgggattacaggtgtgagtcaccatgcccggccatgtatatatataattttaaaaattaagatgaaattcacataaaataaaattagccattttaaagtgtacaatttagtggtgtgtggttcattcacaaagctgtacaaccaccaccatctagttccaaacattttctttttttctgagacggagtctcactctgtcacccaggctcgagttcagtggtcttgaactcctgatgtcaggtgattctcctagttccaaatgttttcattatctccccccaacaaaacccatacctatcaagctgtcactccccataccccattctctttttcatctcagcccctgtcaatctggtttttgtccttatggacttaccaattctgaatatttcctataaacagaatcacacaatatttgattttttttttaaaactaagccttgctctgtctcccaggctggagtgctgtggcgtgattttkgttcactgcaacctcygccttccaagwtcaagagattctccwgyctcagctyccaagtagctgggattacaggcatgtggtaccaygcctggctaattttcttgtatttttagtagggacatgttggccaggctggttgtgagctcctggcctcaggtgatccacacgcctcagtgtcccagagtgctgatattacaggcgtaatatgtgatcttttgtgtctggttcctttcacgttgaacgctatttttgaggttcgtgcctgttgtagaccacagtcacacactgctgtagtcttcccccatcctcattcccagctgcctcctcctactgtttccctctatcaaaaagcctccttggcgcaggttccctgagctgtgggattctgcactggtgctttggattccctgatatgttccttcaaatccactgagaattaaataaacatcgctaaagcatgacctccccacgtcaagaggtgatctgtgccattttgtgtgtgattcttttattgtcaggtccctagggatttttctggaaggaatgttggtgagaacgcctccctcacctcagtgacaactctgtgaagggccaaaccattgtcttgctcgtcactgtactctcaatacagcatgtggcatatgacaggtgttcaaaatatttggtgaggaatgaatgaatgagtggctaaatcagccacccactacccccacagcccacagaaaatggagctaggctactccatcagactgtgtctcctccatatcccactttcttctttggcccagaataaattatcatccccaaagggcccaggatgcccccagttctgcctgccagttactctcaatcccctgtgctgcaatgccaccttttgataaagcttagcgctattcttgaagtggaaccactctaaattcagcctccaggctggacacggtggcttatggctataatcccagtactttgggaggccgagtcaggtggatcacctcaagtcagggggtcgagaccagcctgcccaacatacagaaaccctgtctcaactaaaaaaatagaaaaattagctgggtgtggtggcacgcacctgtagtcccagctacttgggaggctgagacaggaaaatcgcttgaacgcaggaggcagaggttgcagtgagccaatatcccaccactgcactccagcctgggtgacaaagcgagattccatctcaaaaataaataaataaataaataaatacaacctccacatattccaccagcaggaccaccacccttccctgagggagttgttgcaagtttaatatctttatcgcaaggatacatcagccagcctgtggccaatgggaagctggttctgggactcagccctgagatgctaaccttttggcctctgcagcacctgccagctttaggctccttgtagcctctgaagagttagcagggactctgcctgtgcaaatgcatggcacacattccctcaccaaccacagaaataaaacaacaaacagagaaacatgtcttttaagagtgacagcagaatctgcccggcttatttcacctaacataacttcctgcagttccatccatgttgctgcaaatatcaggatctttttcttttttaatggctgaatagtactcccatctgtatgggcaccatatgaacacttaggttgattccatatcttggctgttgtgaacagagctgcgaaatacatgggagtgcagacatctcttcggtatacagatttccttttattggaatacacttagcagtgggattgctggattgtatggtagctcgatttttaatgtttttcttttttgtttgtttatttttattttattttattttttttttgagatggagtcttactctgttacccaggctggagtgcagtggtatgatcttagctcactgcaagcctctgcctcctgggttcaagccattctcttgcctcagcctcccaagtagctgggactacaggcacccaccatcacgcctggctgattttgtatttttagtagagatggagtttcaccatgttggccaggctggtcttgaactcctgacttcaggtgatctgcctacctcagcctcccaaagtgctgggattacaggcataagtcactgcgcctggcctatttctacttttttttttaaggaaactccatattgttcctcaaagtggctctactaatatacattaccaccaacagtgtacaaaggttccatgggggattctttcagattgagtggtcagagagggcttctttgagaaggcttctgagagttggccatgagaaggtgtggtgagaagccttctcagctgagggaacagcaaggtaaaaggcccggaggtgagaaagcaaacttggcaccttccgggagcaagcaggcattgcctctgataatgtttcctcctggtaaaatgacagctctgggagggcagggttcttatttcctatctatctatctatcatctatctatctatctatctatctatctatctatctatctatctatctatctatcatctatctatctatctatctatcatctatctatctatcatctatctatctatctatatctatctgtctatctaatcacctatctttctatgtatctatcatctatgtatctatccatctgtctttatttatttatagagtcagagtcttgctctgttgcccattgtattagtccgttttcatgctgctgataaaaacataccttagactgggtaatttataaagaaaaagaggtttaataaactcacagttacacatgactggggaggcctcacaatcatgctgaaaggcaaaagtcacatcttacatggcgctggcaagagagagaatgagaaccaagtgaaaggggttttccattataaaaccaacagatcacatgagacttattgactagtatgaggacagtatgggggaaaccacccctatgattcaatgatctcccaccgggtccctcccacaacatgtagggattatggcagctacaattcaagatgagatttggatggggacacagcaaaaccatatcacccagactggagtgcagtggtgtgatcatggctcattgcggcctccaactcctggattcaagcaatcctcccatctcagcctcctgagtagtgaggactaagtttgtgacaccacctctggctaacttttaaatattttgaaaggatgtagtcttgctattttgcccaggctggtcttgtactcttggtctgaaatgatctccccatcttgacgtcccaaagcactgagattacaggtgtgagccattgcacctggcaggttctcatttacttaattattactgttgtcatggtttgctttggtccctgtgggttcccccaccctccagaacaagtgcctgacatatagtagggttcacaataaatatttgtggagtaaataagagctgagccttcaagggatccaaaatacttgcatggagtttttctaggtgggtacaatgccacccagctgcatgactatttcagggtgttcattggctcctttgggtgatattttgacatctatataagaactcccacttctccaaatctgggggccacatctttagagttctcagcttcccgtctgtcaggaatgaaggagataatatcactgattggagccagattgtctggacgttgaatcccagctccttgctggtgcccttgagaagtgacttaagccctctgtgtgccttatttctgcctctgtaagcagagatcatcatagcacctctaatgtggggctgtttgaagattcagtgaggtatgtgcaaagagctttttgcacttccaaaaagtgtctgggatatcattgtgcactgtaagaatgcactgtaacaattatcattgagtcttcttgttgggattaaaagagatcaggtctgtcagggcctggtacagaagtggtatcagaaaaataatgacgtgccggctgctcacaaggcttcccaggccaagctggtgtgggaaagagagtttctggagtaccagatgagttggtctcccctatgtgagacacccatggggagccatgggcggcctctgaggagaaaagtctccttattgtctttatgtctttatgctcccagagcatacctgctcagcggcattccacaggttgctcagggagataacacttccttaaagcagtgaagtacaatcaaacatcttggcttcttctgaaacccactcccacccatttcagtcctgataagattttaagtagtttagacacacgcctttgctcaaggaaattcacagaaactgccactgctctacatcttattgaataactcacgagttctccttcattgattaatcctttttctcatcccttccttgccttctcatctgccctaagaacaaagagcttgtaagccaataaattaggcagagccaaagagctctgggccatgagcaagcctctgacactctggtcccccggacccaccttttaaattctcactctgtttctttctaactctttagtctccgttggactcgcggtacctgcagggtggtgtggggctggtttccccaacatctggcgcccaacgtgggactccccgttatctctacaaataatctggtgaaggaatgctagagcatggaaagtggaagatgacagaaaaagggtgcctgaatatgttttcacttcaagctctgtggataagtagtgtgcttggagaattccacggtaacctcgggaaaacgggtcaggctgagagtaaatttgctaattacttaagcttggtgtggcagttattgtgccacagaggggcaattgtgagtacccaaaatctcacatctttgttccagctcatagaaaagtattccccttggttcccggaatatggaaccatgaatgtaaaagactgcgacaagttcggagcagacttaaaatgagcacaacaagagggctacaatattcccttgtctgcttggtctgtgtggtcagcaatcaaaataccactggagcctttccacactgaggaggatgagaagtttcaggatgacatagaaaagtttaataatcaggagtttgatgatctgcaaagtgaaccatcacagtttagttttaaaaagggggagaaagggatatatgctaacctccaaaaacttatagaagaaacatttccacctactgcagaaacagtgccacccactgcgcctttaggggaaggtccagaatggccacccccrcctcagccttatgaatttttggaatgggagcctgagacatgacttgctgctcccattgttgcatgccccacaattaactatgttgaagggaagcttcaggctcacccaacagccaattatggtgagggaatgatccaggcttgtccaccttttaattatggtagaggaatgctgtgagcaggtccaaatacaaattacggtgcagggacaatccaggcatctatttaccaggcatgagatgtgggggatttggatgcttggcagtttctggtaattatttctccagctgaggagcccagacaacatgctgaagcatgctgggagccatttccttttaaaatattaaaagacttaaagcaagcaattggacaatatgggccaaattctccttaggttcattccttgttacaatctgtggcttataacaggcatttaatacctatggattgggaggcattagcccactctaccctgtcccccactgagtttctccaatttaaaacctggcggacagatcaagcaacaacaaatcaggcatgcagaaatgctcaagcccaacctcctgttaatatcacatctgatcacttgcttggaatcagacaggcatggggtactctaaattgacagatggtaatgggtgatgagactgttgatcagctcagaactatatgcctcagagcctgggaaaaaattcacgaccctggtactacttatacttcttttaactcagttcaacagggtccaaaggagccttatccagattttatcacccatttgcaagacacggctcaaaaggctattttggattctcatgtcaggaaagtgatagttcagctgcttgcttatgaaaatgctgatacagaatgtcaggcagaaattagacctattaagggaaaggcagatctaaatgaggaaaaaactttaagtgaatacattaaagcctgtgatggcattggaggcacttgaataaggccagccttcttgctccggcaatggctagactaagggtaacaaaaaacatatgagtgttccccagatcttgctataattgtggacagataggacatacaaaaagagagtgtacaaaaaaggcaaaacttaggaggaaaaagcagggaaccaggtacctgtcccagatgtaaaaaaggaaaacactgggctaatcactgtcattcaaagtttgataacagcggacagcccttgccaggaaatggacagaggggcc

SEQ ID NO: 94428 - DNA, 26615 bp, Homo sapiens
caagaccagccttggcaaaatggtgaaaccctgtctttacaaaaaatacaaaaattggctgggcatggtgatgtgcacctgtagtcccagctacttggaaggctaaggtgggaggatggcttgagcctgggaggacaaggctgcagtgagctgtgatcgtgccactgcactccagcctaaatgacagagggagactctgtcttaaaaaaaaaaaaaaagagagggagaaggaaggaaggaaggaaggaaaataaaagggagggagggaggaaaggaggaagagatggagaaaggaaggaaagaaagaaaggaaagaaagaaaaagaaagaaaggaaggaagaaaagaaagaaagaaaggaaagaaagaaagagaaaagagaaaagaaaagaaagagggagggaggaaggaaggaagggaaggaaggaaaaaattcctcaacatgacacagcaatgtttagcgggttttactgtgtagatcttacactaaatgtaagccaaatgtaatgctaggtatgccattttttgtgtcattgcttatggcatttttattttaatttccaaataaagaactatgatcgatttttccattttaaaaatctttgtctaccccaagttcacaaagattttctcctatgctttcttttgaagaattcatagttatagcttttacttttaagtctgagtcattatgagttaatttttaaatatagcgtgaaataagagcaaaagcatattttttccttaaggaaattcagttattccaacactttcgttaaaagactttcctttctcccattgaatagctttggcaccttaatcaaaaatcagttgattatataagtgtctgtttctagaccttcttttctgtttcattgatcagtatatgcctacactactttattgtaaaataaggtgagccctctgaattcgttactcttttttttttttttttttttttttgagatggagtcttgctctgtcgcccaggctggagtgcagtggcacaatctccgctcactgcaagctccgtctcccgggttcacgccattctcctgcctcagcctcccgagtagctgggactacaggcgcccgccatcacacccagctaattttttgtatttttagtagagacggggtttcaccatgttagccaggatggtcttgatctcctgacctcgtgatccgcccgcctcggcctcccaaagtgctgggattacaggcgtgagccaccgcgcccggcctgttactcttttataattactttgactagtagttgtaaaagatatacgtcctagaattttttttttttttttttttttgagacagagtctcgctctgtcgcccaggctggagtgcagtggcacgaactcggctcactgtaacctctgcctcccgggttcaagtgattctcctgcctcagcctcccaagtagctgggattacaagtgcccaacaccatgcccagctaatttttgtacttttagtagaaacagggttttgccatgttggccaggctggtctcaagctcctgacctaaggtgaactgcccgcctcagcctcccaaagtgctgggattacaggcgtgagataccttgcccagccacagcttagaattttaaaatcatgttactaatttataccaaaacaaaaacagcctgctgaaatttttattgggattacaagtaatctgttgatcaatttcagaagaactgacatcttaacaatattaagtcttctaattcgtggccatgataaatctcttcatttagatacttaatttctctcatcaatgatttgtagttatgctattgcacaacttttgttaattttaagtattttatgttttcaatggtattataacaaaaggctttcaatatctcttaaaatcttaaatcctggctgtctgcagtggctcacacctgtaatcccgacactttgagaggccaaggtgggtagattgcttgagctcagaagttcgagactagcctgggcaacttggcaaaatataaaaatacaaaaagatagctgggtgtggtcgtgcgcacctatggtcccagctcctcaggaggatgaggtgggaggatgaggtgggaggattgcttcagcctgggaggcagaggctgcagtgagccgagatcatgccaccacactccagcctgagtgacagagagagaccatgtctcaaaaataaaaaataacaaaatcttaaatccagagccatacagaattttgtaataagagattcttctgtattcacatttaagaactacattccccagtggctgcaaatttctattctaagaagctatcatttcttttgatacctattgatcacgatggggaatggaaatgggtccagtgtgctcttgtcaatccaggaatttttcagaggaagggtttaatattggttgaatgcccaagaatccaggttacatgggaggaacaaagggagtgtgggttaatcatcataatcccaaaactagcacagaaagtgggtatggcctcagacatcacccaaggtgctgaaaggaatcgcctcccagccacaacacacctgctctttcctctccaaaccactaatgcccatcccaactccagattttggaaagggtcaactcccacttttaaaaatcctgtttaaaagatacttctggctgggtgtggtggctcacacctgtaatcctagcactttgtgaagccaaagcgagtggatcacttgaggtcaggagttcaaaaccagcctggccaacatggtgaaactccatctctactaaaaatacaaaaaattagccgggcatggtggtgcacatctgtaatcccacctactggggaggctgaggcaggagaatcgcttgaacccgggaggcggaggttgcagtgagctgagatggagccactgcactccagcctgggtgacacagcgagactgtctcaaaataaaataaaatgtacttctgagtgtgttgtgagtgtgtatctgtgtctgtggggaggtgtgtgtgcacgtctgtgtctgtttctgggatccttctaatctcattagtagtagcttttgtctccttgggattttatgtatctgataatatcagcgatgaataaaagttttatttcctccttttcaatttgtactgcatttctcttttgtactttacagcaatggctatattgtttaatatgagtggtgagagctgacatcactgtgtttgttgggtatggagaaccagtcagccaagaaaatacctgttaagtacaatactttacatagttaagaatacaaagtattgttttcatttatttagcatctttttggtatgtttgtcattgagggagtggtaagtgggtatgagagctagtatagaggattaaatgtgtaggaagttatgactgtttttatccactcatatatatatatgggagagaaaaggctatattttattatagagtaatgcatttcttattttccattgtttgttttgcatagaaaatttctaaaacttaaaataatactctccataaaccaatattcttctgcgctttttttttttttaattgagacagagtctgctgtgttgcccaggctggagtgcagtggtatgatcacggctccctgcagccttgaactcctaggctcaagtgatcctcccacctcagccttctgagtggctgactataggcacatgccaccacatccagcatccagctaactttttttttttttgagatggaatttcactttcgtcacccaggctggagcgcaatggccggatcatggatcactgcaacctccgcctcccaggttcaagcgattctcctgcctcagcctcccaagtagctgggattacaggtgcccaccaccatgcccagctaatttttgtattttagtagagacagagtttcactatgttgcccaggctggtctcaaacccctgacctcaggcaatccaccacccgcctcagccccccaaagtactgggattacaggtgtgagccaccacgcctggcctaatgttgttggttgttttgttttgttttggtagagacaaggtctcactatttccccaggctagtctcaaactcctggcctcagcctcccgaatagctggggttacaggcatatgccaccacgcccagctaatttttttgtatttttagtaaaaaaggggtttcactgtgttggccacgctggtctccaacccctgacctctggtgatccacccccgtcggcctcccaacgtgctgggaaccagtgcgcctggcctaaaatcttaaaaataataaaagaaatgtttaaatcctattgtgacgttaattgaaatctgaccagagccaaataacaacaaagtaataatactaataactagcaaccctcgtgagtacttatgtagcaggttttggagttccagcctagttttgccaaaactccttatttaatcctaggcccctgtctcagcctcccgagtagctgggactacaggtgcacacaaccacacctggctaatttttgtatttttcagtagagacagggtttcaccacgtttgacaggctggtcttgaactcctgacctcaggtgatccaccaacctcagcctcccaaagtgctgggattacaggcctggggcatcatgcccagcccaattttttttttttttttttttgagacaaggtcttgctctgtcactcaggctggaaggcagtggtgtgatcatagctcaccatagccaggacctcttgggctcaagcaatccttccacctcagcctcccgagtagctgggaccacaggcatgcgccacaatgcctggctaattttttaatcttttgtagagacagggtctcactatgttgcccaggttggtctcagactcctgggctcaagcaattctcctgcctttgcagtgagataatttaggaatcagagagactgaggggttgaggaggatttcttattattatttaggtgcaccggcccagtcagatcaacatccaaaatgactgagccccaaacaaagagtccagttaccttttaagcatttctggggcaggaggagatctgtgcagggggaagcatacaacagaagcgagaaacaaagacacttattcagtagagacatgcattacatcatttcttacttttcaaggaacggcatattttacgacttgagattatctgtctagtgaccttgcagctgcacagctagagaaacagagtcttcacaatgcctggcaaagggagagataaggctccctagccacagaaaaacaggcagttaattttaaaggactccagctctttctcttcctcaaggggaattgggttttcttacgtaagaaactgagcttttgcttacaaaaagagctccaaagggaaagagctgcttacagtggcctcaaatcattggctgaatacagagctgcacaggctgagggaaagactccacaaagctgaggagaaaacagctactgagaaaagaacgactgccggctgagcagctgagggatgaacattttttttttttttgagacagagtctcactctgtcacccaggctgaggtgcagccacgtgatctcagctcactgcaaccactgcctcccaggttcaagcgattctcctgcctcagcttcccaagtagctgggactacaggtgcccaccaacacagccagctaatttttagtattttgagatcacgccactgcactcgaacctgggtgacagagtgagactccatctcaaaaaaaagtaaatacataaaaataaagctgaagatgtcctcattaccaaggtaccaaggtaccaaggtaaggtcccagaatcctccaatagccatgttacatcttcctccacagcctagaatctccatgttcatcccaaacttcctccctcaggacctcccaacaatacacatttccaaagcctcctacaatagaggccaccaaactcccatgtacaccagatacccatgtcctgacctcaaaaccctttcctaatgaactcaaatggccatgttcccctacacagtctccctcaagacagaattagtgtgcaggtgtcagccccttgtgatagacaagcagaggaagagcagcagtggatctaagaacaggtgaatgtccaccacatgtcctaattgtgtgggcttggcctccaggatatcatcttcttcctgcacccttgactttyaaggaaggaacaaatatggagaataaagkggggagccataaggaggacgaggaagatcttagggacctagaaataaaaacagcaccttcaaggcgttgagcttccctgtgcctgatgctgtgctaaggakaacttttcatggagtgtgcwatgcagtcttcacaaatctgtgataaaggttctatgatcatccacattttacatrtgagcaaacagagtcagaatcattaagattcaaccactgaaagtacctagcacagatgtagtagtcagatctgtttgactctagaggctatgctttttttttttttttttgagacagtctcactctgtcacccaggctggaatgcagtggcacaatctcggctcactgaaacctctgcctcccrggttcaagtgactctcctgcctcaacctcccgagtagctaggattataggcacctaccaccacacctggctaacttttgtattttttagtagagatgggggtttcaccatgttgaccaagctggtcttgaacttgtgacctcaagcgatccaccctccttggcctcccartgtgctgggattacaggcrtgagccaccacacccagctgaggctatgctcttaactacatttactccccttcctgccctttcccctcaatctgcagacagggtactaagaccaactgggaaaaaattcaaactccagggcactgcctgtttcataataaaccacagatctcaagtttcaaacattttccaatatgtgttggcagcttagatgtcatttgttgactcttctaccaaggacgggtgggggaaggtaataagaagccctaaagctgtgtctrgttttgtaacaagcacgtgagtccataaaaccaaatgcctgcatgagatgtaattgtccacgtgctctcccccttggaaagaggctgaaacctttgactcagtgattcctcaacataaggaatttagcagatgttaaaaccacagtctctaattcaaaatttgagctattaggatcactgggtgtgaaatcatggcctccaattttgttggttgtttggggtgggtttttttgtctttttgagacagtgtcttgctctgtcacccaggctggaatgcagtgtcacaatcataattcactgcagccttaaccccctggctcaggcaatcctcccacctcagcctcccaagcagctgggaccacaggtgcattctcccacaccctagtagtagaactttttttaatgtttttgtatagatggtgtctcgctatagggcccaggctagtatccactaccacctcagcctcccagagcaatccttactctcagttacggtttgtggaactataaattggtacagcttcagaggagagtaatgtgaatgcttttctctaaattacaaaagaacatactctcagattcagttaactccacttctagtaatgtctcctatgatgtacaagaaagtgtgcaaaatcacctagattcatcaaagaactgtttacataatgaaaaataggaaaccaacatatgcaccaagatattggttaaacaaattatgatgcattcatttgatagacttggtccatcagaaccccagcagaaaaatatgagtgcttaatggagggacttttttttttgagtcggagtctcgctgtttcgcccaggctggagtgcaattgcgcgatctcagctcactgcaagcttcgcctcccgggttcaggccattctcctgcctcagcctcccragtagctggaactacaggcacccgccaccacgcccggctaattttttgtgtttttagtagagacagggtttcaccatgttagccaggaaggtctcgatctcctgacctcgtcatccgcccgcctcggcctccaaaagtgctgggattacaggtgtgagccgccgcgcctggccaatggagggactttttacaaagtggagggcagtgtgaaagaaccctacaagacgttgaagcactctatggcttacaataaggagacgccatcatcatccttaggttgaaaggtgcagtgagagggagtagtttccgaaaccgagactgattgtataggggtaaaagagagcccccagcaggagggcatggtttctggcagaggaatacaaccattgctatcacacagccaagcaaaataatctgacattgctcttctctcaaacttccattggccaaacccaaaaatttttttaatgtagaggtgaagggagcatgggtggtacagtttatagaggccacccttctaaaagacaggtcatggtggagagtggagatggtagggcaaatagaatacccagcacaatggccaggagctcacacctctaatcccaacactttgggaggctgaggtgggcagatcatgagaccaggaattcaagaccagcttggccaacatggcaagaccctgtctctactaaaaatacaaaaaatagccaggtgtggtggcacacacctgtaatctcagctactcaggaggctgaggcccaagaatcacttgagcccgggaggcagaggtcgcagtgagccaagattgccctactgcactgcagcctgaaagacagagtgagacggtcttaaaagaaaaagaaaaaaaattccaacccaacctgacagatacagtggatatagtaagttactatttgtatatttgtgtatggaataacctggaaactggtaacattagtatcaacttggcaagggaaactgggttgaagaaatttcactttccatcattttgtatcttttgaattttggatagtgtcaacatattatctgatcaaggagaaaagaaatttaaaaatcaggtgtaaagggagtgtacctctgcttccaaatttaagccaagagccactgtgaaaagtagtttggtgatttctaaaaaaacttaaaatagaactaccatccgacccagcaatctcattattgagtatatacacaaaggaatatcaatcgttctaccatgaagacacgtgcacacctttgttcacagcagcactgttcacaatagcaaagatgtggaatcaacctaaatgcccatcagtggtagactggataaagaaaatgtgggctgggcgtggtgactcacgcctgtaatcccagcactttgggaggccaaggtgggtggattacgtgaggtcggtagttcgagaccaagcctgtccaacatggtgaaaccccgtctctactaaaaatacaaaaaaattagccaggcatagtagcgggcacctgtattcccagctacttgggaggctcaggcaggagaagtcacttgaacccaggaggcagaagttgcagtgagatgagatcacaccactgcattccagcctgggcaacagagcaagactctgtctgaaagaaagaaagagagagagagagaaggaatgaaggaaggaaggaaggaaggagaaagacagaaaatgtggtatatatacaccatggaatactacacagccataaaaaggaacaagataatgtcttttgcagcaacatagatggagctggaagccactatcctaagtgaactaatgcagggacagaaaaccagacaccacaggttctcacttataggtgggagctgaacattgactacacattgacacaaaaaagggaacaacaaacagcagggcctacttgagggtaagatgggaggagggtgaggaccgaaaaactacctrtcgggtgctatgcttattacctgggtgatgaaataatgtgtacaccaaaccctcaccattgctgaagagactggcggctaaatagagcagtgggtgaaatggtccctgagtgacatgttaggtctttgtacataatttaaaataatgtggcaatattaattttaaaaaaagaggagtgcaggaagagccagagagagacaatgtgaggatggaagcagagactggagtgatgtgctttgaagatggatgaaggggcttcgcacaaaggaataaaggggcgaccagaagctgaaaaggcgaggaaatggatcctcttatcaaggctccaggaggtaccagccctgctgacaccttgactttatcccagtgaagctgattttggaattctgggccccagaagtaaaataatagtttggggtctgtttgtttacttgtttgattgtttgtttgtttgtttgaaatgaagcttcactcttgttgcccaggctggagtgcagtggtatggtcttggctcactgcagccttgacctcctgagctcaactgattctcccgccttagcttctcaagtagctgggattacaggcatgtgccaccacattcaactcattcttttaactttttatagagagggagtcttgctatgttgcccaggctagtctcaaactcctgtgctcaagcaatcctccttcctcarcctcccaatatattctgggattacaggtgtgacccaccacacccagcctacattatcttttcttactcagtccctcctgcctccctctaaaaaggatccctgtgattacattaggcccagccagacagtctagagtaaacttctcatctcaaaatcctcaacttaatcccacctgcaaggtcctttttaccatgtaaggtaacaaattcacaggttgtaaggataaggacctggacatcttttggggggcattacaacctgccacaacaccatgatctgtaacagccttgcaatgggtcaggcccttcactgactcccagtcacacactcactgactccttatagtagccccaggatgagaggagtgccatcaggcccattttacagatgagaagactgaggctcggaaaaaggaagtcagtttgcccaagtcacaccaaggctaagagaccaacgaggattcaaaccgcgtccatctaactccagatctggttttttgggctgtgctattgtgtcctgggtgctgtgttgaaatatgctgttttggccgggcatggtggctcacgcctgtaatcctagcactttgggaggccaaggtggtggatcacttgagctcaggaattcgaaaccggcctgggcgacatggtgaaaccctgtatctacaaaaaatacaaaaactagaccaggcgcggtggctcatgcctataatcttagcactttgggaagccaaggtgggcacatcacttgaggtcaggagttcgagaccagtctggacaacatggtgaatccccatctctactaaaaatacaaaaaaattagccgggtgtgatctcagctcattgggaggctgaggcaggagaatctcttgaacctgggaggcagacgttgcagtgaactgagatcgtgccaccgcactccagcatgggcgacggagcgagatttcatctcgaaaaaaggaaagaaagaaatgtgttgttcagtatttactatggtctgttcagctgttggacggccagatgctacgtgttgtgttgagatatttctgggtgagattgtagagttgtcaggcactgcatgtgattttgcrttgtgtcatctgctggctgccaacgttgttgcrttgctgcatagtgtgtcctttgttctgctgccttgactgtatgtgttgtgatgccacatcgtgtgttctgtgctgtctgctgggttgctgtgtactagygtgtgttgtgtggcaggattatgtagcggtatgctggcattacgtgttggtgtgtggttaccgtgtcttgggatgtttccgggctggctattaggtcactgcgtgtcgtgtgttggcatgtactgtgatcgtatttgctgggtgttctgttgccctgtgttgttgtgttccgtgatgcctgatgattgccttgtgctatgtcgcgtgctgtgtgtgtgttgccaacctgttctgtggttgggcgttgttgctgtcgatgtgctgcaggaagctgtgggttcggtgctgtctgtggcattgacagatgcttttggggtgtygttaagcagcatgttgtgaccaygtgcccgtgtttgcaccgtaagacacgttgccatggttgagtcggatgttgtgcaaattaatggtgttgctgcatgaggtctggtgtgctgcacatcgcgtcttcctgacccattccattcttcaccctcaggcgagccctttgaccccacgtttgtgctgagtcgctcacggtccaacattatctgttccgtgctcttcggcagccgcttcgactatgatgatgagcgtctgctcaccattatccgccttatcaatgacaactttcaaatcatgagcagcccctggggcgaggtcagccaactgagtccagcaggggcagggtgtggggtccgcaggatctaggaatggagaggaaacagtgggcggggaaagggctgtgaatggcccgcccagggcccgccccctcccatctgaccccacccagagttacacggccacgcccactcccctccactgagcatttatggccgccattgcctccttcccactccccctcagccccaacccccaccccggacctggctgccctttgagaccctgtccctgcctacctaatccacactgaccccattcgcccctgaacacccttcgtcctcctccaaaaccctcctactctgtctggtccccagttgtacgacatcttcccgagcctcctggactgggtgcctgggccgcaccaacgcatcttccagaacttcaagtgcctgagagacctcatcgcccacagcgtccacgaccaccaggcctcgctagaccccagatctccccgggacttcatccactgcttcctcaccaagatggcagaggtaatccctacctggaaatcccacctctagtctgacctgaaattctcctgctgcccctgcctcaaacccacagggaccccagatggggcagggttgggggaccttctccctggagaagctgaagcatctggcccagctgggctggagccaggagccactcgcagccaccgccaacttacagctcattaagaagtcatcaaaggaggtggggcagggcggagggggcagttgctcaggcttgttatcccagcactttggaaggccgaggcaggaggatcgcttgagtccaggagttcgagaccagcctggacaatatagtaagacccagtctctacaacacatacatacacacatacatacacacacacatacatacatacatacacacatacacacatacatacatcatacatacatacatacatcatacatacatacatacacacatacacacatacatrcacacatacatacacacacatacacatacatacacacatacacacatgcatacatacacacatacatacacacacacatacagacatacatacacacatacatacatacacacatacacacacatacatacatacacacatacatacatacatacatacataaaatgtattttttaaaaaaacaagaagtcattcaagctctatccaagaagttaattgtaggccctgcagctgagattttccctgccctgcccttctgcgttccccagctctcccagggaaagaaagttaaacccagctgggactgaatgggcccccagcagcagttgtactggtctagagtgaaggggtctccatccctggctcatatccccacccctctaccacggcagaagaaggaggacccgctragccacttccacatggataccctgctgatgaccacacataacctgctctttggcggcaccgagacggtgggcaccacgctgcgccacgccttcctggcattcatgaagtacccgaaagttcaaggtgaggcccacccacacagcagcgtggaggtgcccatgtgttccagcctcaccccagagcagggaaccacgaccccacctccagtcccgcctcccaggtctgatatagcctcctgctggcaccaggattccacagccaaacccacaaacccacacggaggccaatcccaccacgtggcccacgaggtccacgcagcctgcctgaatcccgacccagatcccacccgcttaattgttggtttttttgtttttgttttgttttttggagacagagtctcgctctgtcacccaggctggagtgcagtggcatgatctcggttggctcactgcaacttctgccccctgagtccaaggcatttctcctgcctcagcctcccaagtagctgggattacaggtgcacaccaccacatccagctaatttttgtatttttagtagagacagggtttcaccaagttggccaggctggtctcaaactcctggcctcaagtgatccacccacctcggcctcccaaagtgctgggattacaggcgtgagccactgcacccagctctgcttagttttttgtttgtttttgagacagagtcactctgtcgcccaggcgtacagtggcacaatcacagctcactgcagccccgacctcgggctcaagcgatcttcccacctccgccttatcaatagctgagagtacagacgtgcaccaccacactcaatacactcagctaattttttattttttgtacagacagagccttgctgtgttgccctggctggtctccaactcctgggctcaakcaatcctctcacctcggcctcccaaagtgctggggttacaggtgtgagccamcgctcccgcctccacctgcttagtcttgctttgtgcccaccgtgtccaccactgcatgctggcttcagagcccagctaacagtcctcccagaactctgccccagagccccagccacccacttgccagggaaccctacctttcccacacagcctggcccacacacggagctctgtctgctactccacctccccaagctccacctctgggtataacccctgctctgcctctgatctccagccctcccacacagtccacccactcgatccaccrtccagcaagtagggtcccgaaactgctcctgaaatcccatcaggtcctggattccaggcctccctgaagccccacccacacaacccaacgcccaggcccttgcacaagccaacctttcgccctcactgacccacttcctcccaggccctggctaactctttttttttttttccttttttttttttttgagatggagtctcgctctgtcacccaggctggagtgcagtggcccaatcccggctcactgcaaccaccgcctcccaggttcaagcaattctcctgcctcagcctcctgagtagctgggaccataggtgtgcgccaccatgcccagctaatttttctattttgttttagagatggagtttcaccatgttgcccaggctggtctctgaagggggccagccccttcacacctgtgggtatttctcatcaggtgggacaagagactgagaaaagaaataaggcacagagacaaagtatagagaaagaacagcgggcccaggggaccagtgctcagcatacggaggaactgcactagccccagtctctgagttccctcagtatttattgattactattttcactatctcggctaggggaatgcggcaggagaacagggtgatagtggggagaaggtcagcaggaaaacatgtgagcaaaggaatccaggttacaaataagtccaagggaaggtactgtgcccagatgtgtaggtaggccagatttatgcttctctccacccaaatatstcagtryagcaaagagtaacagagcagcattgccaccagcatagctcacctccagccacagggtggttttctcctatctcagaacagaaggaatgtatgatcgggttttacactgagacattccattaccagggacatgcaagggatggaggccttcctcttatctcaaccgcaagaggccttcctcttttactaatcctcctcagcacaggccatttactggtgtcaggctgggggatggtcaggtctttcccttcccacaaggccatatctcaggctgtctcagttggaggaaaccttggacaayacccaggctttcttgggcagaggtccctgcagctttccgcagtacactgtgcccaagaatggagaatggcgatgacatttaccaagcatactgcctgtaaacatattgttaacaaggcacaacctgcacagccctagatcccttaaaccttgattccatacagcacgtgtttctgagcacagggttggggctaaagttacagattaacagcatctcaaggcaaagtaattttcttagtacagatcaaaatggagtttcgtatgtcttccttttctacatagacacagyaacagtctgatctctctttcttttccctacagtctcaaactcccgggctcaagtgatccatccacctcagcctcccaagtgctgggattataggcatgagccaccgcgcccggccagctctagctaattctcacatacgccccagcagtggcgcccagcgctgggaggctttgactagacccctccccacatacrgacacacctcttcccagcctgrtttgataccctccaccccactwcccccttcccctccagcccacgtgcaggaggagatcaaccttgtggtgggacacgtgcggctgccagcgctgaaggaccgcgcggccatgccttacacagacatggtgatccacgaggtgcagcrctttgcagacatcatccccatgaacttgccgcaccgcatcactagggacacggcctttcacggcttcctgatacccaaggtgygctaggcctggcaaacgacatcaggcaacctaagaggaggcatcccaggctcttgcagctcgcaagcagtatcccaggcactagcaatcaacaccccaggccttagcaactggcatcccaagccctagctacagacatctcagacccttaaatccagaagctcaggcctttgccaggaccccatctcatatcatactggactagaccccttcaccgtgacaaatccccttcctagaacccctccctggaagccctggggtgtggaacttcatctggaggatcccctgggcctaaacgctattctcagggacccctccttttccccagaaaccccacatctgctcccacaaagggtgggggtttcccacatccctgccaaagtccccaataatacagcatatagcacccatcacttggaaccctagacacccacacatatttccttggcccccgattgagtcctatacccacctatacccaccccttatcaagtccccaggacacccagcccaatacaatggaaaggagtttgggagcctcccagccctcctacactgctaagtccacctcctcacccacacagggcaccgatgtcatcaccctccttaacaccgtccactacgaccccagccagttcctgacgccccaggagttcaaccccgagcattttttggatgccaatcagtccttcaagaagagtccagccttcatgcccttctcagctggtgagggcaggaatcagagtctttctggcccaatttctacctacattcctcatcctaattccacttgccaaatccgctcactccttccttccacccattctcagctttggatgcacagagacattcattcctcctctcaactctgctcctataggcaagtagtgactaaaatcctcgtgaagcaaggtggggaggttgattaataatttaacttgggactgggcatggtgactcacacctgtaatcccagcactttgggaggctgaggtgggtggatcgcctgaggtcaggagttcgagaccagcctgaccaatatggtgaaaccctgtctctgcttaaaatacaaaaattagccgggtgtggtggtgggcgcccatagtcccagctactcctgaggagaaacaggaaaatcacttgaacccgggagccggaggttgcggcgagccgagattgyaccattgtactccagcctcggcaacaaagcgagactctgtctcaaaaaaaataatgataataatttaacagccaggggcagttactcacacctgtaatcccagcactttgggagatctaggcgggcaggtcacctgaggtcaggagtccaagattagcctgaccaacatggtgaaaccctgtctctactaaaaatacaaaactagccaggaatgcacgcctgtaataccagcactttgggaggccaaggcgggcagatcagaaggtcaggagatcgagaccatcctagctaacacgatgaaacaccatctctactaaaaatacaaaaaaattagccggggatggtggtgggctcctgtagtcccagctactcgggaggctgaggcaggagaatggcgtgaacctgggaggcgggccttgcagtgagcagagaccgcaccactgcactccagcctgggcgacagagtgagactccatctcaaaaaaaaaaaaaaaagaaaaaaaattagscaggaaatggtggcacatgcctgtaatcccagctcctctggaggctgaggcaggagaatcacttgaatccaggagatggagcttgcagtgggccgagatcgcgccattgcactccagcctgggcaacaagagcaaaactccgtctcaaaaaaataaataaataataattataataattattatttaacttgggccaggttcatcggctcatgcctgtaatcccagcactttgggaggctgaggtgggaggatcgcttgaggccaggagttcaagaccagcctggacaacatggcaagaccctttctctactgaaaatttttaaattacctagatgtggtgtggtgtgcatctgcggtcccagctacttgggaggctgaggtgggatgatcacttgagctcaggagtttgaggttacagtgagtatgatcatgccactgcaccccagtctgggcgacagagcgagatcctttctctaaaataaaaaatactgactagccaaaaataaaaaatatataaaatgtttaaaagaaaaaataataattgaacttgggagtggtcattgtctacctctccactgggtggcgcagttgaggtggttctagggtttttgttttgttttgttttttggctttcctctttaccctgctgaaaaatacttccctctttactcagtagcaggaaaagaaaaaacaactggcataataataggtaacttaccatattgcctactgtgcgtcaagtgctgcctctacaagagcccagctaagagcttatgttttccgctgggaatgtgcagcccagattccagcagggtttgcatcccatctgtcaccccctagctgtgttgccttgggtatgttacttcacttctctgtacctcaatgtccacatctataaaatggagataatactaaggcctgcctcttggagttgttagaattaattgtgatgtaatgcttagagtagggcatggcccatggtgagctacttacagcctcactgctttccctgtgtttaccattcacagcagcctcatgaggcactattactatccctccttttatttttctttctgagacagggtcttgctctcacccaggctggagggcagtggcacgatcatggctcactgcagccttgatctcctgggctcaagtgatcccctcgcctcagcctcccaagcagctgggactgcaggcatgtgccaccttgcacatttttttttaaattttttatagagatgggatcttgctgtgttgcccaggctgctctcaaactcctgggctcaagagatcctcttgcctcggcctccgaaagtgctgggattacaggcctaagccagcgcgcccagtcttcatatccccattttaaatacccagaaagtgtggtttgtccaggatcacaaaactagtagtgacagcaccgggattcgaacccaagcagcccaggtcattccgctccacagtttaaagcatctttcccacatctttacatgggtgaatctgtgacgtccccagctgctgtcttcctttcctcttatgttttcctctgggaatgtggggttgcagcctctaacctcatcttatctcaccrccgctccccatcctgccacccctgcagggcaccgtctgtgcctgggagagtcgctggcgcgcatggagctctttctgtacctcaccgccatcctgcagagcttttcgctgcagccgctgggtgcgcccgaggacatcgacctgaccccgctcagctcaggtcttggcaatttgccgcggcctttccagctgtgcctgcrcccgcgctaacgccccggcccttccagattcgcctgtgagcgatgaggcccacccatgtgggttgctacgtccccttcttggtccacggtctgcctycatccctctggcagtcacgctgtcttccctgcatgctgtgcctgccgcgtgcccttcccccatccctccaatctgtrccccgtctgcagggcagaggcagatgtggcatgtctttttgtacccacagagcttgttctatggcacgcccttttctrggctttttgtatcatttcttagtacaytgtaatagattcaaaccagtcttggctgaattaaagtgagaatgagagtcatttaggatggggagaagggagctggctgcagagatggagacactggctagttttgccctcacctttagggtggctagggtgggacaaattgtatcctggagacaggcttgaaggtaaaggctgcgaggacctgaagccagtgaggcagagaaaccaagacagagaaaaagatagcaggaccaggcgaagtggctcacacctgtaatcccagcactttgggaggccgaggcgggaggatcgcttgaacccaggagtttgagaccagcctggacaacagagtgaggcctgactctacaaaaaagtcaaaaagtggggcaggaggatttcttgagtctgggaggtcgaggctgcaatggactatcattgtgccactgcattcccgcctgggagacaggagtgagaccccccccaaaaaaaaaaaaagtaagaaagaaaaagaagaagacagcagagagatatcaagaagaagatgacagcagagagatatcagagagaatatgcaagagatgcagggcactgcagagagatggggaaagcagggcaaagtgaggctaagatggaacaagcactgacactaaatgacactccctatttgcacactgttctgaatgcctcatttaagtctccctactttgctctggtttgttttgggggcttttgtttcttttttctttcctttttttttttttttttgagacagagtctcgctctgtcacccaggctggagtgcagtggtgcgatcttggctcactgcaacctccgcctccctggttcacgtgattctcctgcctcagcctcctgagtagctgggactacaggcgtgcgccaccacgcccggctaattttttgtatttttagtagaaacaagagtttcaccctgttagccaggatggtctcaatctcctgaccttgtgatccgcccacctcagcctcccaaagtgctggaattagaggcgtgagccaccggcaaccgcacctaccctgtttatttcttttatagccagggtctccctcttgttgcccaggctggagtgcaatggcacaattcaaggctcactgcaaccttgaacttctgggttcaactgatcctcctgcttctgcttcagatcaccaaatagctgggactacagtcaccgtgcctggctaacttttttttttttaatctttagtagagacagggtcttgcaatgttgcctaggctggtcttgaactcctgacctaaagcgatcctcccacctcatccccccaaagcactgggattacaggcatgagccaccacacctggccacaaagcagtattaccacatttttacagatgagcaaactgaggctcagagaggtgaagtgagttgcccaagatcacacagaaacaggcagagctggtatctaaattcagactctgaggctacagacactgcacttctttttcttcttcttcctcttcttttttttttttcctttttttagagacaagctctcactctgtctctcaggctgggatgcaatggcataatcacatctcactgcagtttcagcctcccaggctcaagcgatcctcccaccttagcctcctgagtagctgggactacagggtgcaccacaaccacacctggctaatttacttttatttttattttttgagacagagtcttgctctgtcacccaggctggagtgcagtggctcgatctcagctcactgcaacctccacctcctgggttcaagcaattttcgtgcctcagcctcccgagcagctgggattacaggcgcccgctaccacacccagctaattttttttttttttttttttttagtagagacagggtttcaccatgttggccaggctggtcttgaactcttggcctcaggtgatctgcctacctcagcttcccaaagtgctgggattacaggcataagccactgcactcagccactaatttttttatttttattttttgtagaggcagtctcactatattgcccaggctggtctcgaactcctgacctcaagtgatcctccagcctcagcctcccaaagttctggacaacctgtgcacactaccatgccctactcagacactgcacttctaactactaccttttaattcacaagtcagagaccaagaaagaggcagacacccttaaatacagagaaaagcagagaaataccgacactaagaaatgggaggcaggggaattgagagagaaaatggaaagaaacagagaaatgaccagagaaagacagatgagcaatgacaatgggagttctgaggactgaggctctctccctcaatcccgagcccctcttttctttttctttctttttttttctttttttttttggagggttggggggacagagtctcactctgttgcccaggctggagtgcagtggcatgatctcagctcactgcaacctccaccttcagcgctcaagtgattctcgtgcctcagcctccctagagtagctgggattacaggcatgcaccaccatgcccggctaatttttgtatttttagtagagatggggtttcaccatgttggccaggcttgtcttgaactactggcctcaagtgatctgcccacctcagcctcccaaagtgctgggattacaggcatgaaccactgcactcggccctcccaccctctcactgaaattctctgaaattctcccctttgggatgaggatggcaaccccaggcatgtaccctcccaacctgggacccgacctaataccctaacatcctgctgacagtggctgttctcgctgggcaggcgtcccaaagcacatcgagccagattcaggcagagtggaactggcccctcagccatcagtggaggtggcctgggaggctctaccctgaacggggtctccccaaagtgatgcagaaactgggacatgctctgctgagcatggggctgactggagtgaggcttataggcagtgcccacatggggattaagatgtcagctctttaatccccacactgttcccatcacaggctgaccagagtctgccccaggacccagccagggacacagaggtcgggggagagagggagaagagagggagagacagagagactcagaggtcctgagaaagacaggcagagagagatgatggagaaaaacacgtgaagacactgagaagagatggagaggaaaaggaagagacagatacgcagggatggcaaagagatcctggaaaacagagaccgggaggagaaagagagccactgagaaaagggaaagacagtgatgtccagagagaggaaagacaaagagaccctaaagcaaagataaataaagagaacagaaatgaagagagatagagagacctgagagaaaaagaaaaagggaggaaaagaaagagagaaacagagaaatccagtctaattacaaagagatagaaacaccaaggcgggaggatcacttgagcccaggagttcgagaccagcctgggcaacatagtgagacctggtctctataaatatttttaaaattagctaggcatggtggcacgcacctctagtcccagctacttgggaggctcaggtgggaggatcacttgagcccaggcagtcatggctgcagtgagctgtgatggtgccactgcactccagcctgggcgacagaacaagacagacagaagggaagggaagagaagaagaaagggaaaagaggggaggggagggaagaaagaggctgggcatggtggcttatgcctgtgatcctagcactttaggaggctgaggcaggaggactgcttgagaccaagagttgaagaccaacctggccaacctaacaagaccctgtctctataaaaaaaaaaaaaaaaaacaaagagaagtagcgaggaagaaaaattgggcattcattcaacaaacatttactaagtgcctactgctgtgctgggcactactttaagtgctgggatacagaagcgaacaagacaaaatccctgctctagaagagctgacattccagaggacagcccacccgagcaaaacggaggaagagtcaggagctggggagaaaccagaagccataataaacaggatccattaaagcctgtcacagagggtggggtagggctgggggaggatgcagcttactgtgccccaccacactcccgctgtcagtggagtcagcagctctgagcaggggtcctgccccacaacccctgtcagtcaccaggttccagaaaggctgacaggtaggaagacccaggataggggaggacagaatatggaggtacaagggggtaaacatgcggaaaggcacgctgaagaaataaggagaggcacagaagtgccaggctgagacaaagggaagcacagactaggggagatacagggaggggaagacacagacatactgaaaagagagacagaaaacagacacaaacagaggcagagactgagagaaaagagagagagatgggaagagacagaaagaggagagagagagatgaacacagaaacacagagactgagagtgagggaggctgggcgcgctggttcacaactatactcccagcagtttgggagaccaaggcagaaagattgcttgagcccaggagttggagaccagcctgggcaacacagtgacatcctgtctccttaaaaaatacaaaaattggccggacgtggtggtgtgtacctatggtcccagctacttgggaggccaaggtgggaggcttgtttgatcccaggaggttgaggctgcagtgagccatgatcgtaccactgcactccagcctgggggacagaagccaggctctgtctcaaaaaaaaaaaagaaaaaaggaagggagggagggagggagggagggagggagggagggagggagggacggacagagggagggagggagggagcaagcaagactgagagatgaaacaaagatacacagagaccctcccagagacaatgccagtcctaggctctgcacagtccaccccccgcccaccatctccccaggtctgggccctgtgccaggcacttggaggaaggctggatttggccaagcagggacaggcaggagggtggaccacattcctgaacagtctgttccaaatacagccccaacctcactgctcccaccaccgcagccctggcccatccaggccagagtctgccccctctagcccatgccctaggatgggggttgggggggatagatgagagaatgagggataagtttgtctgtcgtcatggcctggcctcagacagggacttgggggactggataccagggggttcagcagcatgggcacagaacatttgggggcatctgggagccagtgccttggggatagagatggtagattcagggcaggacataatatggaggtacaaggggatcaacatgcagaaaggcaccctgaagaactaaggagaggcacagaagtgccagactgatggacacccagaagccagggaaattgaaggcagatctggggaacaagcatagtacacagggtcctaagagtaatggaagtgacaagggctcaggtgtgagctcctaggaatcacaggcacagagsacaggaatgccaggggtgtctttagaagtgtatttgagccaggcgcagtggcctgtagtctcaacacctcgggaggccgaggcaggcggatcacctgaggtcagtagcttgagatctgcctggccaacacggtgaaactccgtctctactaaaaatacaaaaattagccaggcctagtggtgcatgcctgtaatcccagctactcaggaggctgaaacaggagaatcttgaacctgggaggtggaggttgcagtgagccgagatcccactgctgcactccagcctgggcaacaagagtgaaactctaagaagggaaaaaaaaaaaacagaagtggtgtatttgagagtcggtgtgtatttaggaatcagaggtacagggtacagcgttcaggggacccagaggtggcccggaga

SEQ ID NO: 94429 - DNA, 52112 bp, Homo sapiens
acataacagcagggcagcaccagtgttaaagaatgcccatcattttatctccttaccagtgacttctaagaagatggttcacagagggagaagaatacaggccaaaattagggattcagtcagtatggactcctgtattgacaatccacctgaaatttggaacaaatcacagattagatttggagccatctcatcttcctctcctcttaacatttgcctctctcctaaacttcttttttttttttttgagacagtgtcttgctctggcgcccagcctggagtgcagtggcaccatctcagctcattgcaacctctgcctcccgtttcaagtgattctcctgcctcagcctcccgagtagctgggattacaggcacccgccaccacgcctggctaatttttgtatttttagcggagatggggtttcaccatgttggccaggctggtctcaaactcctgacctcaactgatcctcccatctcggcctcccaaagtgctgggattacaggtataagccactttgcctggcctctcctaaaattctttatttccagtgtagccaggggaaggcctaggaacgttgacccttaggcaataatgtagatgtatattgctggttgcctcctcagcatgcattcccccagacttgtcacccactgtgcagaaaccacagaacctgggtaggtgtgaaaccccagcccctgtgggggcagggctgatatgcccaattaggatagtcccaactccttgccatagtgatggttttagggatggacagtagcccaggcctaaggcaacagtcacctgacagtttactacccaccatgactggttcagggatgaactaagttgagctaatcagaagaagttcaagactttgttcaatgagtgggtcaagagaagctctctttccttctggaaaacatggtatatggatggtgatgcctggacttggtgcaaccattttgcttccaggaaagaaggtatgctgagtagaaagttgactcatagagaagaagaaaaactgagagatgtgcagaaaaaaaaaaaaagagttctgatcaattcatgcctgaagcttggactgcttctggatttttccataacagaagtccatacacttccctcattgctgaagctggttcgagttgaattttctatgacttgcaacctaaagcatcctagccacaacaccaaatgatcccttggagtccatttttccatttcctaagcagacatgagggaacacacaaaatgatgcaaatgaatgtgttttagaacatactgtcctctagagttctaatctcagcttgatttagacagtcagttgcgtggttaggaaacaatcggagatggaaaggctcaaaaagcaaggaagaagtccaaagaagaagtgggaagataacaacagaggacattaaaaagaaaaaaaaaagtagatgaaatcataatgtagatgcctcagagttatcgtaaaaaccttgttctctctcgcctcctctgtcatccccacatccccacactgctaccaagccctgtggattccatcatccaaatctccctgaaacccactgcctcctcttcatgttcactgccatgcttgggtcagactgttgtgatctgtctcctcctggctctttctgccttcacccttatcctttccaaatccattttctatgagtctcagagtgaccttcccaaatgacaggtccaagcttgtcatttttttactcaaaaacttttgataccttgtcaatgtggaatatggcaaatgcattagctttgaagagagatgattttgaaacctagctctgccacttaccagctgtgtgatctggggcaagcttcttaatctcatcatctaatgtgaactatagatataatattataataggattcctttggttaccagttacagaaaactaacccctactcactgggcaaaaaaaaaaggggaagatttattaactcaaatgacaaatcagagaacagttgtgcaacaggatctcgggggtgatgcaaattagtaactcacagatggcctgtttactctctgccctttgtgatgggggagtagtggtggtggtggtggtggtggtgttctctctctctctttgcttctctctgcactttagctatatttccttggactggctactttgtgaatggctgaaacataaatgacctacagcttccaggctcacatcgctcagtttagttagcaaaagaggagaaactcctgctgtgaatcccaaattcaaaattctcaggcaaggcttggtggctcatgcctataatcccagcttcttgggaggctgaggtgagagaattgcttgagcctgggaggttgaggctatagtgagctgagactgcaccactgcattccagcctgggtgacagagtgagactctgtctcaaaaacacacacaaaaaaaaattcaggaaagagttctaattgtcccatcttgaatcaggtgtccacctagggatcaacaggtaccaggggcaggatgtataagaagacggcagcttccatttaaccgattacagagattacattataaaaacatttagcagaagcaaatggtgctgttctggatagacaaaccaatagatactctctacaaagtttacaaggttgtttgggggatgaaataagatgtcctatatcaatgagcaccaaatacccgggaccataactggatacagtatacagcagatgctctagaaatttgtgtttattcccttcattacatcctcgctcccagaaccactgcttgcctagacagtgccttcatcttttgctacatagaccaaggttcccctctgagtggatgcacccctatgggcacagggtttgacaaacagaagtcacatttgtggtaagaaaaaagtgcccttcttgcaatgaacgcagccttgagctgggaccatgcctttgtagtaagcgtgtgggtcagatttcttcctcagtggccccattggccctggcctttggcctttgtacagtggagactgcccaacccatgccagaccctgcattcttcatatggctttcagaagctcatggactgcctgcattatatggttcccaattaaatacaaaccagttccccagcaccactaatcatgcactctgtccaccttacatgcctcaccattcccaggaagttgtgtgctgttccttcttgctttgatgcagtgctcttggcctttcccaggcattcttaccttactcccattagactcttaagccccaggtcaatgacatcacttctgcaaatccttcctcaacacacctggacctatgtactaattgcctcctctgcacctccagaagcctattctctattctctagcacagcactgctcacactatagagtgctttcctgtttgctaataagttccttgaatggtttagctagaagtgactgtggctttccagctctttgtccccagcccaggaataaaatctggcatctaacagacctcaataaatgcttgttaattgaaatatggaatgaattaagtatgagaggaaggagggagtacaggaaaaagagtaagagaaggctgattaggaatttcactgttctcagccagatgcagtgacctgtaagcccagaactttgggaggctgaggcaggcgsatcactttgaactcaggagttcgagactagcctgggcaacgtggcgaaaccccgctctgcaaaaaaatacaaaaattagctaggcatgatggcacatgcctgtaatcccagctacttggaggctgaggctggagaatcacttgaaccagggaggcagaggttgcagtgagccaagatcatgcctttgcactccagcctgagcgacagagtgacagagagacagagcaagaccctatctcaaaaaaaaaaaaaaaaagaaagaaaaagaaaaagaaatttcactgttctcacacagacctgtgtctgtttcaacatttgcacaaataaaaggagagaagcaagcagacagcctatgggacgctcagaaacaaagtgctttctatctccaatccctgaaatttgagagctttttctgtaactttttttttttttttttttttttttttaccacttggacattatcttctttgctcatgggaaagtgaggtttctgttgcggtctgattggtgcttccagctaaggcattcatgggctgacaggggggcattctggatagcccccctccccatcccacatatacaccaagtgggatcagctccagagctctaagtattcctggcagtcagttttggcaactctgtgggccaaaagaatgaggtcactgtcaccaatgaagtcaccactgcatgattcatcggacatcagttccccactgggaatgctatgacattcccagagcttctcctactcttagctcacatttatagatgagaaaacggaggcccagagaagggaagtgacatgctcaaggtaacactgctaaccagggtcagagctaggaccaaactcagctctcctggctgagtgctctccttttcaagctcctggatagaccctcctttcaggacacgagtccctgcaaatgctgcctgaacaaatggtcctgcaagccaagaatggggcaggccctgctctctttctctctaagagcaagtagcagaggccggtcttgaaccaggaactgaccttaaggcacttttctgccttcctcaacctgttattcagtccatacaaaatatcttccagattcattgcatctaaagcagctagcaatgcgcatacctagtcgcagacacgcagggccaaagggtgggtcctggggagaggctcaatgagaatctgcaaggaacttacagtgatttccgaagccttcctgggagagtggaaatcagattcggagtttgagagttcaggcctcctggatagtgaggaacgggaatacaacagtgagcatttccccaagtgtgctccaagtccttgagtactgggagcagctggaagcctttgggacaaccgcttcacctttctaggtctcagttttcttccctacaacctaagggtgatggtccagttgacctccgcgctgcctctcaatgctgcatttttctaacgctgtgaatcgatgaaaggaagcgattacctctagtcagcaagttgaggggaggggtgcggtgtcagcgcagagtgcacccccgccccaatgcccagtgttcaatgctgcattcttggccagtgaacaggacctggccagatgggtgtgttccggcatcsccaggcagaggggcaggggttgccgcctcgagcacaggccaagtttcagagcactagtgtgtatcagttctccgggattacaacggaatacctttgaggaacattggggaccgaaaggcgacctcggagaatgtggcctccagggggagcccaggtacatttgccgggtccggagccgacggggtatcctttttctggctggtgtgtgtgtggaggggcgtgcttcagtggttcaacacgctgtatctcccttagtyaccggtttcatagtaaatgattaaagctcgtgctacggaaggcgtggggtggtggtggtgggggggaccacgcaataagccagggttcctgctttccagctcaaggaccgccaccaccccacgcgccttaaatttttttttttttttttttacccttttggtctctcctccttgatttctagttccgttgtgcacttagaggccgagaggatggctctggccttccgggtggaggtgaaatatgcatgtataatttggcatgactattgcgtcatcgtggaggtcgtcgtggttccccgagaggcctccacgtcttctcccagcatcggggcctttggacgcttccgggcgctgcgggcacttgcgcgaggagccctcggctccccaggcgactcccctcctcccctccgcggtcctcggctcctcctcctcctgcgcgcccctccgcgcggccctcgcagggagtggggctcgggtgcgccggcagggccgcgcggcggcagcaggcgggggcgcgtggcgcgggccgcgctcggggaggcgcctgggcccgccctcctccggggcgccgcgggaggggcccgggttggcgcggggcggggagagccgcctggcccctcccctccgccgccctccccaaagttgccgtctcccccggggccggccggtcttatgatccggcggatcctcctggggaggccgggccggggagagggcgcgggcgccgagtggcgggggcagcgggcgggcgcggcgaccggggccggggcggggatccgggcggcgaccgcggcggcggcagcgccccgggcccgccgccccctcccctcctgcgaggggagccgctgcatggggccgggggggcggccctgcggcgcggagcggcggcgacggcggcggaccccccaggcgggctggggctgagcccggggccggggcgggggctccggggggaccatgcccggaggccggccggcagcagcatggctcacgggcccggcgcgctgatgctcaagtgcgtggtggtcggcgacggggcggtgggcaagacgtgcctactcatgagctatgccaacgacgccttcccggaggagtacgtgcccaccgtcttcgaccactacgcaggtaagcctcggaactgctgactaaggggccgctccccgggccgggaactttggagcaactttggcggagccccctcgccgcctccccagagcgcactcctctcccctcccccgccgcgccctctgccaggcggccggccccacccccgaagcttcgctcctggcaacccctcgcccgctgatccaccccctctcccacccgccccctacgcggctcctgctccccgcacttcctacccctcggcgccctgggccgtcctccttgaccttcccacatcccctttcctactgccccaaggccccgggggaaatattcgaggggaccgagcgagacgtggctacgggacttgggagaagggggtggacggctggggaccacatcacaccccggccctttgccggttcacagtgagctggccgcacgggaaaagggggtgacatctcgcggggagcgcccccacgcctctagctgggttgggagaggagggtccgggtggggagcgaaattgccccagagcccaggtcactgtgagcttctctccccgcccccacttctgtccttgcagtcagcgtcaccgtggggggcaagcagtacctcctaggactctatgacacggccggacaggtgagtgtcttggcctctggccgacgcccccctcctgttccccagttctttgtggctgcgaagggcctttggaaaccgaggtgtctaggtgggagggtgtgtctgcgacgggcttcccctggattaggtctttatttcttgtaacaagtcagcaaattaggaaaacaaacaaaacaaacagasccggataagccccccccatgtgaacccctgggctgtgaaagtttttgcctgtgtgggtcgttctgtgtggcgcctggtgtgtgggtcccaactcctgttgcaaagtggcagcagccaatcatgaagcgcccttatttttagttgcagatgaccaggtctcccccccacagcctctgtctggtccctcattggtgagtggtctgcctgcccaaggagcctgattggtgggaaatggcatcatctaatatgatgggaaggcatttggtcctggttatgtttattacaacatcattgcactctgggactccagtccctgaaaacgtaatttgtggtgttaccaaaggaccacagggaaaaaagaaaagaaacaacaaccatgtagccactccctggggtggggaggaagggttaggagtttagagtgaatcttggaggaggaggggttccccccggccctacttcagaagggccaggtgactttgtctgggttttctttgggagagattaattgtgcagaaagaagatgcacactttgccctgcagcctctggccagggtttgcacatcagaggtggccaggctgtgcttctaaagggccaaggtcttctctctgtctccctgtcccagcttcagcctcttcccaaacccacttttgctctggggataagttgtgtgtgatgaattttgtagaatccagcactatgattagagttgaagactctggcagaagtttccacatgtcatacagacttacatccttgagaacacaggagcagctgaaagtcttagagaatgtctttgggggaagtccagtagtagaatttccttatctgcaaaatggggtttaaaaaaataagatgatcccctggtgcagatattgtatggcaaatgtttagcattgaacctggcacacactaggtgctcaataaagggagtgatgtactttgaagcttgtctagatttggatttcagaactgtgattagagtttaggttggattctgaaacatgccttattgagggggagtgccttgatgtgacctctggtttctaaactgttagaggaacgtctgaagatagagaactgctggcagttcaaggtccctgagaccaccccctttcaccaaaatggcccaggtcagtacagccagttctcagctctcctgggcccccaytggttgcctgccctgtagtcgttattccttctaccttcattggaggatgtggagggcaaggggcagagcttgctcaatcaactaagactgacttttaagtcgtattattgataaacaagaggttgaccttattggttgaaaagaggaagcttttaaaaaatcgcctctaatttgaacttctcactaccttcctttctcttatctcctttacttgtgaccatgataatttttgaccgcactccctgttcaacaggatgtgtgtagtcagagctgttctgagtatgtttaaaccctgctagtatttactgagttttttcctacatatggggccagaggcagacacatgcaaatattattttatttagtccataaaacaaccccatgagataggtggtatttcatctttgcggtgaggaaacaggctcagagaagctaggttgcttgcctgaggtcacacagctactgaggggtgttgctaggattgggacaggggtctgaatctgctccagtttgaagtagttatacacacaggacaccatgggaatgctgagatgccacggggttgattggattgtttgtgcatccatagttgtggtacctgtaatcttcacagccattctctgagtgggtgttggatggcacctctacagaggagagaacttagatccagagtcacttgaagttgaccccacttacaaaaccagggctttccatatatggccgtaatyactctttttagtggaggatcataagatatagaccaagcaggatgaacatattagtaaggctcaaatactactgttttcacccaatgctggacaccattggtggggcctagatgtgtgttaggccccattggtgtttttcccagtgtctagacttttgtttttgcatcaaagctagtaatatttcatctcccagcatttgagggtttattactaataagcaacttagcaatgatgagaccaaatggcaagtgcctgctgtgtacctggtactatgtccaggtacttttgcacctggggagtgcaaaggaatgaatttaaaatggggatctaccacagctgatgtcagcaaagggagaaatgtctgtctcgggtctctgttcatgtgttacataggagatctctacattgcacttggtcattaagacctcaggcttctaggaatccatatcagatttgtcttacaataataacaatgataaataaacatgtaaataaaaagtaaataaaaaacattaagggtttatatatatatatatgtatccgtatacacatatacatatatatatatatatatatatgtgtatatatatatatatatatatatatatatatatatgtatatacatatatatatatacacaaatccttaagcctagtgggcagcagagaaaggtccatgggctttggaacaaaacaggcctgggctcagatctccaccttagctagtcatgtgattctagctaaattatttacctttgtgatctagtaaaaacgtgaataattagaatctgcattacaaggtcataggctggcttaaactctttaacatatttaaaagcagctgatactttgtgcatagtgggtgagtgacaaatagtacaggaaattattatattccactatggggagttttgtggggagaaaggttcacagagtggaagagaacagtatattgtgcctggagttgatagaaattccactagaatgccagatcctagaaccttttcaaccaaggtgtgcaacagctttgcgcattgtaattcccatagtccctattgtgggatccatggttccaagcccagtgctccctgccgtaaatgccctgttgtatcagatggttttctgtcttaagcagagcccgtatccccattgatagaagagaaatagcttagagttccatgcagaatttgacagacaagtagggtatgtaggcttcagttggttctactttcagagagttaagatggaatgaggcagctcatggcactacaggtcagktgccttctctccaaaatgttcactcatgcatgtgggcactcattgtatttgaataacagcaacagtgcctccctcagtttggaacctctagtccacttgctcactcatggtccctgccttaaccccagtcaagttcaaagccataggcatcatttgtccgactgacatattagggcatctaccagtcaaagggtgattgttgtagatgacctttggccttctagagcaggctgctttccacttgacctctgctgctattagcagacaaagagagagaatgggagagrgagtgtattggacttcagtccccatcatgtgcactgcctggggacatcccagcacactcagagcaccactgccaaagggaacacttcccctctgttggccaagcccatgggtggtccaggagcagctgtcacattttgactgccaagcattttggagtggaagttgaccgaggcatcttccttctcactaggggccttgcgtgtgttttgggggtgaggggttggcttcctgcctgggcctctgtggagcttctcctttcttgcccagccttcaggacttcagtgtaggctctgcagcaaccccattgtctgctcaaggagggactggagagatgggattttccctcctgctactgcactgtttggagcgatgggaagtggaaagagctctccctctctgtccagacaggccagtggggagctgcctggcaagctgctctctagctgtgggctctaggcygatctcttaatccttggcaggaaggcagaacttgataccctggagagggaaggactgaagcccagtttattcaggtcccagaatatccacactcaggaggatgtgtgttgggggtgaatttgggatccctagagttccagatttagccactgtctcagtgtgtggaagtcaatttgtgtgctttgggatgtattgtttctatgtctgttaacttaaacacacaagttcagggaagcgtccatgacagctataaatatcttttactctggtgtcccttggtgttgctttttcaatgacaagtgagatttgttttacacttgatataacccagcagctgtggctgccctgcatgccctctgggtgcccacaaggcacttcccctacagaagggaatctccaccggaggcaggcttggcatgccccaccttctgcattttagcagaagggcctggcatgatgagaaaagggaaggagaaagggccatgggatcaccactcaccaggctcctcccacctccaggcaagtcatcctcacaacacccttcaaggtagacttctcccagatgaggaaattgggaacaagtgggcttatgggaaccagacagagatgtgattaggaaaaaggttttctactttggagaaggcctgcagggaacattagtagggtttaggaaatgccactcacaacatcagactctgggtccttgtagccccgtgttccatccttgctcagcccggtgagcagagcctgggaggagccccagggttccttccaggcatcagctgcaacaggtgagatgctggcactgagcatcctggtttcccttagtaacctactgtagatttgtcatgtgtgcattttgctaacctttttagaagctatttatatctctagcccacaccgcatcacacgggaatgctggtttcctcctctgcgttgggaaggtggatagcctttgttgactccaaagcctttgctgtgttcgctccaaagtctgaatgccctgtgttcccctccttgggactctgatgtgggtttgggttatgccagcttagactgtgggctggcaggcagggactttagggtgggggcagtccccaccagctctcgttggtctacaattatgcctcataatcgggcacataatctgtgccccatccccatcctggacctttgatctgtttggcttctccacttccatcatgattctcctgaggtttggtgacattcccacgctttgaacgacagcttccccgcaggtatctcaagcatgagtgttacaggtgtgctgagatgccaagctctcatctctgaggggccgggggagtgacagcctaagggggttgagcatgtattgtcagttgctgtgggtgctgtgatgtgaaaaaggtgggaagcattgctttaagcccctcggggtcagaggccccatggagaattgggcttttgcggttttgttgtgcagtttggggtttcaagagatkagatctaatggtatgaaaacaaagccaacaaagtagctctccacgggggtgtccgtttccagaaagagcacatgtgttggcagctgtgggtgctacagaggcctcagacacaacagcaatgcttcagcaggagagggacgcagttacaaagaaacaagatggaagaccatgtgtggctcttaaaaattaaaattcctgattctcagctgtatttcctttctctctgacaggcttggctttgccctaatttggcacacttgggtcagagagcagctttccttgccctcagcaatttgtcattcctcttttggtttctgagcacagctgctttgcatgtacggaggctgggctgtctgagctctcaggggtcccccggctccctgggtagaacgctctcctgcccagtgcctgccaggacctcctggatgcgttcttgctctcttcaagaacagtgtctttctctaccatgttgcagtgctcagcccagtgcctgctaccttgtaggcatgcaacaaatacatcttaaggggattcatggccaggcagggtggcatgttcttgtctgtaatctcagtactttgggaggccaaggctggaggatcatttgaggtcaggagttcaagacgagcctggacaacacaacaagacccccaattctactaaawttttttttttaattagccagatgtggtaatgcatgcctctgtagtcccagctactcaggaggctgaggtgggaggatcacttgagtgcaggaattcaaagctgcagtgagctataatacaaggcttcattgcactccagcctaggcattagagcgagaccgtgtttatttaaaaaaaaaaaaaaagaattgattctcatttgactgtcagcttgtttctgctaaaaggttaaccaaggactaaagtcatagctgctaaataatagcatcagcacaaccccttttccaggaaagcttcactaatacagtagaagtctttaaggttcaaaggagaaacaggcacataggtatggggcaggccatcagttttgtctttacacaggcccaggggccttagtgatcaccagtgggtctgtctgtcccccaacactctgtctcrgactccggcctttgcatgtttcctgagacctcttgctcccagatccyctgaggaggagacaggttggcagtggaaagagtgtgggttttggagcctccagatgaacttcgaatcctagttctacctctttgtagctgtgagacatcggccagccggctcacttctgtgagcctctcttccttctgtgtgaagtgtggagataatttataccctgcagcatagctgtaaggattagaaatgatgtatgtcgttaccctgtagggcttggtgctgagagtgcgggcccaggctagctttgggggcttcacactggctcagttcggttggtgttgattcaatgcctggtgtgtgttcccaccttccacaggagaaggtgggggatcgggccacagaaaggtccactacacaactgggcaagttcatcgtgtgaaattgagtgctgcagggtcccacacaggaagaggtgacagggaggagctttttggaagatctaggcttgcaggaagagatgggggccagtagagtactggttgccagtgtggacccccacactggactsccagggcccaacttcagctctgccacttcccagcaaggggcttaaccttcggaaacctgtttccttatctgtcagatggagattatgatagtacctccttgtggggttgttagatatgttggagcttcccagctcccagataagggatttcctcagccctcagggcagctgggtagggcctgggacaagccatggctcaggttgtcctagcttgagcagtctcacctcaggcatgcagcagtggctcctctactccacccgatgtgtgctgaacacatcatctcattttctctgtgtgccatgaggtgaagatttgggaagcattgacctaaatgagttccagcaggcagaggggtgtggagagctcatattctgagtgggaagaatagtgtagggaggaacggcagagggggtgaccccaaagcgtctttttatggaccccagatccctgctatcagtgtcaacatgtggagcagggttgataactaaattatggagtttttcacctggtgactgacaacttggtaattaaagagatattaatctggtgctgtgttgctggttgattttaatagaaagaaaagaatgtggggaaaggggtctttattgctgtctctgttcctttttgagtgaatggtgagagcactgaagcagccgcctctccagatccctagattttcctgctctactcaggctcagggtagactgaggggcttaaaagtggcaggctcatcatcaaatgacatttttacagcacataaagcatgtcgcacctggtaccgccttgagttccctcacctgctctgtgagtaaaggaagccagtggtggctgtctcattttgcagatctggggaggttaaatgactcgctccaggccacacggttggtaaaaggcaaagccgagatcaccaggcaggctgtcggactttaagccctgggttcttgatgttaagtcactctccctaatcatctggcccatgttaaatgcctcttttatcacatgcactgttgttcagcgtttcatgtaaaaggtacattccaagcgtatcgcttttctagctagaagagatggtggaacattgtgtataggtggaacacgtagggacggctgctaaaacggctcctacaaagacttctgccccacgtgacgttacgggtgttttgtcactttgtccctaaaccaccatgcttcctcaaaaaggagcaggcccgaggtggcgctgatggccccattgctcaagtacgtgtggaagaagctcatgccatttgcctaaagctgtggccccttcccagaagagagggacagggaaatgctgtttggggggctgccaggcgggccagctttagcctgcaaatgacrggtgtcgtttgtgtcccatgggggctacctcaggcctttcctttctcccttcaaggattttcttattcaggggaagcctacctctgcaaaactgtttgtccctccttcatctgaatattctctaaatatggcgcaaaacttcctctgccacctgctgctcatattgtttgccctcttgggccatccccattgccaccacctctgcatgggctcccaaatcctgcctggctgcttcctgtggtggctggcaagcctagaagagaacattcatccagtcagtcaacatacatttcctgagcaccagatctgggccaggggcaggtgttagaagatctgtcaggcacaggcctggcccccagaggcacagtgttttgaagggtaggtcaaccatgagtggtgggagggcagtggggcctatttattgggggcacagaggaggaaggcttatccttccaaggaggtgaaatgctagtaagagttaagttgagtaaggttgtttccacgaaagttgttttttagctggagaaagtgatcagtttggattcttacacgtactagatgctcagcgaggccttgaatggtggcactggttctcaaagtgtgatcctcaaaccaacatggatttcctgggaacttgttagacatccaaattcttaggctctatcccaaatcctctgaatgaaaaactaagaaatctcttttataaaagcccttcaggtgattgtgacgcaggctaaactttcagagtcactgaattaatgactgtgcacttctgtacctgctctttgcaacccatctccaccccctgccccctccctccctaccacatccaccgctgtcttacatacacactgtccctggagtgcagagaacatgacttattttattcttttttttattttttcaatttttaaaaaaatgttgtgggtgtatagtaggcgtaaacatttgtggggcacatgaaatgtttagatacaggcatgcaatgtgaaataagcacatcatggagaatagggtatccatcccctcaagcagttactctttgtgctacaaacaatccaattacagtctttgagttatttttaaatgtacagttgcattattattgactatagtcaccctgttgtgccatcaaatagtgtcatgtctttttcgaacttttttttttttttgagacagagtctcgctctatcgcccaggctggagtgcagtggcacggtcttggctcactcaacctccacctcctgggttcaagcaattctcctgtctcagcctcccaagtagctgggactacaggtgcccgccaccatgcccagctaattttggtattttagtagagacagggtttcaccatattggccaggctggtcccgaacttctgaccttgtgatccgcccacttcagcctcccaaagtgctgggattacaggcgtgagccaccgtgcctggccctaactatttttttgtacccattaaccatccctacctcccgccaaacccccaactacacatcccagcctctggtacccatccttctactccctatgtccatgagttcaattgttttgatttttaagatcctacaaataagtgagaatacgtgatgtttgtctttctgttgctggcttattttacttaatcatctccagttctatccatgttgttgcaaatgacaggatctcattgtgtgtgtgtgttttttttttttaatttataaatttttaaacccccagccccacaaaacacacccccatataccctcatttctagttctttacacatggttgagattatccgtaattactggaatgaattgaatgattcagccatgggtgctccctatccagttcacctggtggagaagggccgcagtgctatcaggagaaaaaaaatggaagcagaattttttgtggggtgccttggctccattagtgtgctatgtggcctagggctgtgcgcccagtaggctctgcaggtatttcttgatgcggcctaaacaccaagctatttctctcscgcatattaaggggctcgatagacaggacgcctggacagggctctgttcattgtggctgaggttagcactcctctgggtggtgacagaccctgtccctgagaaggatggcagcttggtttgtgctaaattagttccaaagcatcagatgggcaatgacgtcctttctgtgttaacattccccaggcgggtcacaaggagtggctgaagggagaggaagggctgtgttactcaaacacccatcttgccagtaattacttctttcctggctgacctctgctttctgtgcaagtgttctcccctccctttattctcctgcscctgctcttttacatttttttctttctttctttttttttttttttcaaatttgttccaatctagaaaacccatcctctttcaaatggcataatggttgggattataaatgagttggctcaaagtgtgccccctctaggagcagccactgagagagcatttaattttgagcatccagttcaattaaaattccatttaatccagcttacttttcacagagttgtcttccccagtgagctgattacctggaggtgtttccaccagcctccttggccctggaggaatggggaagggactggacacgaggagggacagagcaggcagatgggggctctgcttccttcggacagggacttcgtccaacaggcgaragctttgggtattcatccactgcagaaagtgagaagtccaactgaggctgaggcaccccatgacctcctcacctctgactccggccctctagtggtcgagtccctccttagaatttccactaagtgaattgtctccaggctgcactctagcatttggttttattcatgtgtaaatctttgctccccatgcagattgtaaactcttccccttgccgtccctgcaggactgcacgtagcacatagcactttgcacaagtgttgggggccccagtaggaactaggtgtgtgttaaatttaggggagtctggtggtaagattattatggaaagaacctttcccatcactttatatcatatccatattggctttcctatcagctcatttgagaggaaattctgacctgtctggacattattgagtggctttaaagcaggttataggtggcgatttgaatacattgaccatttaagcaaagtgggactcatttctggactcacagagctcattaagcagacaggctgccaggtctgtttggatgaaatactggctatgcgcatgtactgttctccagcaagtctagacctgtaggagtccttcactgggctttatgtcaggtgtgcttccagagtggcctgtggccctctgtgataagtcggtaggagggggacatggtgaggatgctgacctgctcacttgtgtcttgactgggagaccggaatgcctcctgttgtctgaacaagctagtatggaagtagcatctaggcaagctggtgttaagacgcaagtaattactcagagaaattgctggtgtgtcaaactgcttgatatgtaagtttcctcctctttcctttgttttattttttgaggcataattcagagaacactttcatcaccccagaacgaaaccccatacccaccgacagtcactccccaccattcctcctcccccgtctcctggcaaccactaatctgtctttctgtttctatggatttacctattctggacatttcatattaatggaatcctgcaatgtttgccctttgtgtctggcttctttcacttagcataacgttttctaaggttcatccatgttgtagaaggtatcaacattccattcctttttatggctctgtgatctttctctttccattttattcctgcccccgctctttttcagttgttcttccatggccattctttcccgggctctggggactattttcagggtttcaaggtacaaagtgaagttctgctagttgtgcacttgtggtgctgccttcgcccctggctcaggtagaggcgagggctgatctcttctctacccttctgatattctttttcttaaaaaatttttttaattttttttttttgttccttttaatgcttgggtctggaccttccagtgttcttgttttctctgtgcctctgttcatatactctcccaccccaaccacaccctaatagctttatttatcaaacatataaatatccattaaacataagagtgaggtgaggaacacaaaattccatccgatcgggttcttcccccgtaggagtttacagtccagttggaagatgaatagagctggccagaatgcaagtagaaaatggratgtgcatataaatcatgaaatgtgagtgaggagtgttagaaaggtgcccaactacccggctgtttgacctgagcttcccagataggcaaggtttctgtggggccgtttagattcagaaacaattttattggggctttcaaggaccatcaggtacatgggtctgatttatgttaactcgtaagagatcagcctataaatgaggttgccaaagagttaatctaccatgtagccccagtggaaaaatggacaagacataaaccaatagctcacaagagaagaaaaacaaatagccaatgaaaacacactctgtaaagacatgtgaataaaaactttgtttttcaacctatcmagttgaaaaggagaaaggaaagtaaatactctctgccccatttttgggaatgaaaactgaaacaaccagtttggaggttaatttgccaaagactctttggtttgcagtgatctgattttatgaatttatgcctagaaaacattcagtgtacccagagatttacataaaatgatattcttcacaatgttatttataatagtgataaattataaacacattgatgcatagtaaaaagggagttgctaaatcacagaatgatttatattagaataatcacagccattaaaaactgccttcaacaaatatttaaagaaatgtgaaaaggctaatgatgtgttaagtgtgaaaaagcaggaatcaaaaccatatatatatgtatagtatgattaaaactttaaagaaaatgcacatgtataatatgcagaggaaaaatcagaacaaaatagtcaaaatgttaaagtggttggttctaggtggtgaccatgaataattttagaaatttacttctttatactttattgtgttccctaatttttttaaaaaaactcatttttatcaaacttctatatgcagatggtttaaagagtcagcagttctggaaggagttattatgaagaaataaaatattcctctttacttctcctgcagaaaagacatttcccactaccctgagacaaccactttcaactctgctgtttattttgataacaaatattctctgttgaattcacatgatgactgatgaggcctgagctccctttcacacatatcttccacttcctatccacctttctgtaggagctatattgtaatttcagtttgaccactgatcagtgtttatatttttatgactattcacagctgagccatgtagtgtactatgattatattttttttcttgtaccactttctgtttctcaagtgaacaattatcttgttgcttctcttacttggttttcactgtatgtctcagctatttcatgcaaaattcaccctcccatgcagcaagtcatatcaagtattctgtcagtttcttcttttgcagccatccctcctgcaccttctaacctgctgtagctgggctggtgcctcttgcctgctgcacagctgttatcctgggatttcccttcaggtttattaggattctctttgcctctatctcttgtattagatccctgtttccaggatctcaggtcttactggtttatttcctcactttggtggaatgtatattttattagtttcctgagaaaagagtcattgtaggcaacttttgggatacctagtatgtttgaaaatgtttttattccttcataccggactgatactttgaaaatagattatattttttctccctttggaatttttaaggcattgtcccattgtctttcagcttctatttaagttgtttagaagtcccctgccaacctgatccctgatccattgtcaggaacccatttttcctctctgaaacttaggatctgccattttaacctcctgaaatttcacaatcataggctttggggtagggcctggctgggtacccacaatctggaaactcatatcttccagttctaacaaattttcctggattatttctttggtttatttagtttcagtcagtctcttttgttaccctggaacttccactattcagatgctggagttgctggaatgatcctctaattatcttacatttcctttctgtcttttttctttattttggggagaaatagaaacttcctcaagtttatcatctaccccttctattctgtttttgaaatgtgattctatttttaaagtgccttttcctgttgtctggatgttctttttttctttagcatcttctaagcggtttaggttttgttttgttttgtttgagacaggctctcactctgttgcccaggctggagtgcagtggtgtgatctaggctcactgcaacctccacctcccaggttcaagtgatcctcccacctcagcttcctgagtagttgggactatagctgcatgccaccacttctggctagttttttgtttgtttgtttctttggtttctttttgttgttgttgttgttgttgtttggtagagaggaagttttgccatgttgtccaagctggtcttgaactcctgtgctcaagtgatccacctgcctcggcctctcaaagttttggaattataggcatgagccactgtacctgtctagtttgttttttgatggtatatcatctctgatttctctgaggatattaatgatagtrtttcaaattttttgtctctctgtgtaatctctaattttgatctctttcaggtagttcctcaaatgtctatctgtgtttacaagagtggcattgagcacatgagaaagcatgtatgggcagggctggttgactctgagcttccctgttggtcagggtttctcagcttcagtactgttgacattgaaggctggattgtttgttgtgggggggctgtcttgtgcactgtaggttgtttagcagcatccccagccttttccccctagatgccagcagcatccctcctccattgatggcaaacagaaatgtctccagatattgccagatgttctcctggggcaacaccagtcctcacttaccccacccccagttgagaaccactgttgtagggtgatctgttggggtctttttattggggaacctgtagggttagtaggtattggtcttcccccttgggctagtcatataaaccaggaaagaatcttctactcttctgcccgagggattcatcctgggaggcgagtgaaagaagcagagtgttggaggggggtctcaattttctttgtaccgtggccttgtgtgcttcgactgggcctggtgtctcccattcgggaagcctagttctgcccttaccagagaataagtatcatctgcctttcaccaggattggggagcatttatcatgatagggaaggggaaaaggtattaaaaagcaaactcgttccaccctcttgcttgtggctccgcgttcagtccagctgcagaagcaggcgctcttctggttcccatagcttcagaccctcagggaggtctgctgtgcagtccggtgtttaactggcacctcattgctcgctccgaatttggctccgtgggcctgttaagtaagttccacttgtttttttgccttttagcttctaaattttgttattgttatttcttttcctatttcttttgtccttgtggctttatgttttttaaaacaattactgtacatgttagaggattttggagaggtcaaagataaatgcatacgttcagttggctgggacttaactgaagtcttctctttttttatagttagaaacataaatatgaagaacaaagttatagtggtggatattctgttcagggccaggctcctgatgaattaataaagaagttgcttggcatacaggctttgcagcaaagcgagttggatttctgggaggagatttctgtttcatctggatcctggggtcacgtgatcacgttttccttccatacgagagcatgggtttccagtggccaggatctgttgtgtccactagctccagcatccgctgtcttactgttggacagaggtagatagtcactaatattctcattatgcaatttctactttgctagactttgcgtagagtctgtatagaccatgacttttcagttaacatatttttcagataggccaaaacatactccattaggttatagctttctttagttacattgcagtcaccttgattagatttgggtgttttgaagtgtctcagtcatctgaatataaaccgtattacagatgactaataacaattacaaattgattttcattaacttaattttcaaaatgtagccctatctcaaatgcatagagtgtcctactatagaccccataaacacacacacacacacacacacacacacacacacacacacaaaacctgtatatagacatatatctctctaatatattagtatatatatgtatatacaggtatgtgtgtgtgcgcacgtttatatgtctgtgtgtgtgtgtatatatatatacacctttgatatatatgtgtgtgtatatatatatgtgtatatatgtacatatgtatatatacctttgatacaggtatcaaagacattggccaggcaggaagagtacggtgaggggagggtctggacagttttcctaagtgagtagctggtatgtgtgtatggtttggggtggcaagggggcccaggcaagacagagtattccaggccaagaaaagagcacagaaagagtcatgtgggagaagctggggtggatggggaggtgtgggagcagcctatgttcattttggctacagagtagtcgttcatcggagaagccattaaatctaaggtgggaagaggagtttgatgactgcatggccaaccttgaactctgagctacatagtttggacttctaaagggcacggtcttctgaagatgggtgccttgatggagagattaacagagaacatccagtaatacctatttttccatgtagccttttctgtttgtcaagggcagatgtattctctccactctgaatccctgtggcacttagcatcaatggctcttggctcttgtattcatctgtgcctacatttgaggcttccttggacccgtttatcccatttagccctaacaatgacattaagaggtaggtcatactgtctacccctccctctgcaccgcatttttttagtggatgaggaaatagggtcagagatagggaaatgacttgaacaagattacatacatggccagtgagaggccaccctggacctcgggccaggccctctgactccagatctgcattccactgttctcatgacatccccttgctgccagtgtctcactggttgcttaactaagccagtggctctttgaagggagactcacacgatttgattttccaggcagcacataacacaggcccaaacgatggagcacaggctctgacaagactcacttatcggcagcacagggtggggatgagaacagggacctagccggttcctatgcaatttcaccagactgtagggtctatacctctaagtttgaaactccctcatccccactgctgccagcccaactgctccagtgatagttttccaccacttcaccgagagcctgggctcagctgctgccctcactgccctggagaaagagaggaatgacaccacctgtcccgttgctgactctaaggcttttatgagaatacacaaaagagaatagatacttgaaaccrctggaatgacagtttatctggtgattttcttataaagttctattgttactagtttcctcctctatctgtactgttgcttctctttgattttgtctcactggctcttgctttgcttcagaaatggcactcctccctagccaggtcctttagagtaggaaatcaagaagttgagctgctagattgtctgaacttcttggaacacagaggatgctagtgtagacatgtgtgcattattgtacagggagccactgaaacctgcctgctgtgtgcaaagtgggccgagaggactccgtggccacatcaaagcccatgtgcatttgactcttttcccttcccagcctttgattttttttgaaaaacgtatttgagatatatcagtttagctattttctcagtattttaataaaatacctgactttagtccttgcctgccatgtaaacctacacacttatttaaaccagcaaaatttctcagtgcgtttgtgctgaagttaatttcacattcagttctcattttctgcctatttattactctgccccaaatctgctgaaactgaatggaaaaggaacactattcggtggacatggttataaattagcagccagcacatgtgttaagtgcctttcataccttagctcatttcttttcccagtgtttaagaggaggctccattagtagtccattttataaataaaagaaacagaaaaggtaagtaacttgtgcccagggccacacagctaggaagcctgactcagagactcaggaggtctgtgtctgaaaccccatgatagactacctggttgaaacaaagaggggttgtgtgggagagggtcctacactcgtggttaggagaattgcattcctgcttcactcctacccacctctccgtgtgactctggacaggtggtgagcttctttgatcctatttcctcatcagtgaggtggcagctgacctatctcctaggctgatggtgaagagtcagtgggtagcctgggttgctgtgaaggcatgagcaggcactcttctgggctgtaaagttacataggctgtagtaatgtcatgaggctatttgttttgtgataggccgggaagagcccccacggggaaccgtctgtagtataaaagggccagagctggtgggaagaagataaagggaagtaatacagaataggcaggggaggggagggcatcaaacccgtgcaaggaggataagctgtgctcagtggtgatggatgcatattgtgaagaattgatgtcaacacatcaactcttggcctccagggacttcttgcagggtaattctgcaagaattttctgaattttcaaagaaatctaggtgagtgtgcatgtgtgcatacacacgcatgtgtgtctgggtacctgtaaggcaagatcatacctttgcacacttgtggacctgtgtgtatttctttcctctttttttctctttttcttaatggagacagggtctccctatgttkcccaggctggtctcaaactgggctcaagggatcctcctgccttggcttcccaaagtgctaggattataggcgtgggccaccacgcccagcccctgtgtgtattttttttaaattgaggtgaaatttacacgacataaatttaaccatttttaagtatataatcaggctggatgcagtagctcatgcctataatcctagcactttgggaggccaaggcaggaggattgcttgagctcaggagttcaagaccagcctaggcaacacagtgagacccccatctctacaaaaaataaaaaattggccagatgtggtagcacgtacctgtagtcccagctacttggaagactgaggcaggaagattgcttaagcccaggagtttgactctgtattgagccacgatcgcaccactgcacaccagcctgggtgacagaatgagatcctgtctcctgtctctaaaagaaaaattaaaaaataaagtatacaatccagtggcatttagtacattcactgtgttgtacaaccaccagctctgccagttccaaaacattttcatctcctcctcagaaattgtgtgtgtttttgaaagggcctgttctgtgcaagcatgtctgtgagggcatcctgatttcgcctgccgggaagccatcctcgtcctcagatggcagattgcactgtatgcgtttatttggccagcagagtggggctcaagtattcacattccacatgggtttgttggtcatggcttaactcctctgtgcactctggctgcctcatctggacatagaggaaggcagcactgcagccttcatctgagtgtagttaccagggtcttctctttgctgcttggctgcgtgttgcctttgtctattaaaaggatgtgtgtaagtatgtatgtcaactggggacttcagcctctgtaggccaagtgttgaaaagggtgagagggctgctctggtagaagtgtcagagctgggatgtctgtacacctccctctccatagctagtcctggagataagtaagagcagattctgggactgagctgtcgcatacaccctggtggtgataacagcaaacacagcaatgggctatgtagagggagccctgaataatctccatgagctgcagagatagggccagtgagtggcaaatccttttatagtgtggaggagaggaggtggggagcagctgcaggagaaggtggggagcagctgcagaaggagaaggtggagcaggagctacgttggacaagccagtgaatactttgctctgattggacaacccagatcatgtgcccaccaaaaaccagcgacttagtgggaggggcaggagtggggaatgaaactcaatgattggcttaatccaaccagggactctctatatagctaagtatggggccagggtccccaggggcatgtgtctgagtgtagaaggggtggtgggtcctgcactgaatcagagttttcgaaagaaggaggaagtaggagaagaatgctggatagacagtcaactgtattctccatacctagataagacaaatgtcaagacaatgcagaaaaagttgtggtgaaaagcagcaggaactaaaatgcttaaagcatcactcagtctgaggctctcctattaagagctcacattcagggaggtgggttggacccattggtgtgccacagaaaaatggccctgctcacaggaggcaatttgacatctggccgaaagtgacatcagcagcctgagaaattaacctgttactggagagaattcaggtatttgatccactttctcaagctttgtagctggtgaaggaggtgcagctagcactgtgcaagctacctgcacaatgactgcagctgacttttctcacttcaccttcccatgagctaccgtcattgattcagcgggaatgtaataagctgcgaccatgagccaggccttgagcaatagtcccctgccctcagggagtcctgatgcagaaggggaagatgcagatcagaagaggcaatcgtattacagtataaacaaacaggatgacaggagaagcttgtggtgccacagaagtgtggagcatggcaatgcttaagctgaactgggggttcagagaagatctgctggatgaagtgatttccagactcaagcctggaagatgagtaggagctcccaggtgaagaaatacggagagagagaagaaacagggaaactcactgggcaggtgactgctttagtgtgtgtatttgtgttaggggttgatcctgagaactttcaggtttctggcttgtgcaccctgattgagtggtgatatcttctastgagatggtgaatacaggaggagttgcagttttgattgggaagaaatgaatttagttcagaaatgttgaatttgagatgcttctggttcagctaaaaggaggtacatagtaataagctagttctggaactcagaggcagagacctcctctgaccacctgcttgacatctcaagcttaacacgtcccaaactgtcctcttgagttctctccctatggtgcttctctaccctaccctcagttttcttcatccctctaaaagatgccatatcatctagatatatccagaatatatctagaatccaccatttctctagctgtcaactgctgtcccttagtctaagcttccatcttctctcagctgaattactataataacctctccccttataagcctgactgcctaattcattcttctcaaagtagcctggattatcgttttcaaattttgtgacttttttgcgggggtcgggggctcaccttttaatgactttccattgcaggtgggccctgcagaggggtccaagctgactccctctccagccccacctgtcacctggcctttccctgtggtcttcagtatgtcagggcttttctgccttgggacgtttgcatacattgtcttgttgtctgtctccttaagcggtccctcaggtctcaggttgaacatcacccctgcagagaggtctttcttgcctgcgcagactgaaactcatcttcctggttattctctctcccagaacctggctcttttccttcatagcacctgtcccaatttgcatttatagtcatttttgtcccaatttgttcaatgcctgatttgatacctcaattttatcagacccatctcccatttttataacaaatacttcctttttacttatcctcaaatgaaatctatagataatataacctccctatacatgtaattttaaatcagtataacatcctggcagtgatataaaggagaaataaaaaggaaagtaattcatcataaaactatttatttcagtgttaaattcctaaactcccaaggctgactactccagaaatcataatgaagtaatcaggcctgcacctattaggtaaaatgaccacgaatgcaacagttacaaatattggctaacatagttattttttattagtgactcagatactaacagcaatgtagccagtggcatgtggttttctgtgatggtaagtaaatcctgtgatgtttgttttttctttttcttcttttttttttttctttgagacagggtgtcgttctgtcacccaggctggagtgcagtggcatgatctcagctcactgcagcctcaatctcccaggctcaagtgatcttcccacctcagcctgccaagtagctgggactataggcacacaccatcacacctggctcattttttatttttgtagagatcgtgttttgccatgttgcccacactggtcttgaactcctggactcaagcaatccacctgtctcagcctcgcagagtgctgtgattacaggcataagccactgcacccagcctcctgtgatgtttcaaacaaaataaagttcaatctttctccttcaatgtggactgaaattaccttcctagaaaattcattaaagtctgagggccgtggctcrtgcctataatcccaacattttagggggctgaggcaggataattgcttgagcccaggagttcgatactagcccaggcaacagagcaagacccctgtctctacaaaaaaaaaataaaataaaaaaatttctgactagctgggcatggtggcatatgcccgtagtatcaactactcgggaggctgaggtggaggctagagcccaggaggtcaaggctgtagcaatctgtgatcatgctactgcactccagcctgggtgacggagtaaaaccctgctcaaaaaagaaaaagtttaaaatatgcactaaagttatgccaaaaaactttatttttttatatatgcagcaggatcaggtcctagattcatgcgattataaaaggtgttccatggtgagcaggtctatgcaaacctaccttcaaaggccaagggagctgagaggctgaagaaagagactgacaaakccagtttctcagaaagaaatatttaatagagacttagaaacagaaacgatgtctaggtaggccaagagatggtggattctcacaaccaacctccagaaagtatcctttatatagcaagcttttagggtaaagacacaggaagctcatcatccctgacttcctttagaaactcatgaccacggggaggttgtgagggcttatctgtgctactggaccaccttgaattgtaggcgtcaaacattggtcatcatggcagttttacttcaagatggatcactcttgctatgcaacaggctgttttcccacaaaagagtttttcatgtttatgaatgtctagcagtacactcactagtcatgcgggcctggagctggttttcctcatacaggtcattgtggcaccacggctcccacccttaaatgctagcagagtttccccattcattttggcaattgacagcacctcccaaatgtccgaaatgccccccagacatagggtggtactgccctagctgagagccctgtgcctactcctctgctgtcctctacacagaatgagggcagggtctgtgttgtgttcactcgtctatacacagcactcagcacctacttgccagatatttgtggagtgaatgaatgttctatcaacatgaaatttgtgccaaaaagttaggaaaggagtataccacatggaaatgtgaccagacatttaccttctttcagcatgctttaggccagctgacctctgttttagtgcaagagacttgtaattatagctccagacaatatggaatttcagctctaaatcctttacaactggggaagtcacctcaccatgcacagaagaaatagcactggctccgaagttgtggtttgtctttttttggaaagtcaggcttgtctgccaaagagctcgaaacacttgaccagctctctcatttatcttaacatgtgtatttattctcccttcacagatggggaagtgaagcttgcctgagggctgtatttagctaagtcttgatcctctgccttgtggtggtcagcttagataaaatggaatcctaaaacttgatttttatcccgtagtgtgaacctcctcccacattaaatctgctagtagggctgctcacaagggtaagaagtgttagtttgagtgtttttcatcatgtgacgtggcggtcttctagttcagggccctgcttttagagatgaggaagtgccagttcgtcacaacacagttagataatgacaaggccagtcctctagctggtttctttatgctccaccagatgtaaattttctctccgtttcctccagccaacctaaacaggagttacaatcagtcaggtggccaaaaggaaagcacaatggaaaagaagcccaagatctagttctctagctcctaaataattggtatattaattaggaggctgacttattataaatcaaaacatatgaagatgacagtagctaaaagtaagaagctaaacctttaatttcaagaattcttttactaagcgctaatcaggccagtgacatataaataccatttcacaactgaactgaaaattaaaaaagaaaagaaaacaccagatgtttgcaaagtttttgaaaaacagtgacctcttaagaatttatagcacctaaaaaaacctttctcttccccaaaattttctttagtccaagagtgctgggaggtagtaggaagtggtaggcaaattcagtaaactcatcactggtgagttttgaaccaaacttaccaaagtgttttcaaaaaggacccaacccagcttccttgaaaaacagagttatttttaaagaggtaaaaactgatattttcatttcacaaagttaaatataaaatgaactcaaaagtgtcaaaatgactgcacaatagaaatgaggtttcaggccaggcgtggkggctcatgcctgtaatcccagcactttgggaggccaagggaggcggatcacagggtcaagagattgagaccctcctggctaacacggtgaacacccgtttctactaaaaatacaaaaaattagccagccatggtggcaggcacctgtaatcccagctactcaggaggcagaggcatgagaattgcttgaatccgggaggcagaggtggcagtgagccgagattgtgctattgcactctagtctgggctataagagtgagacttcatctcaaaaaataaaaaaaaaaaaagaaatgaggtttcataggctactctgaccaagcattaccatagacatgttgtgatatataagttagatgtaggagaaaacagttgcattctcagaagctggcttcatgacatgtgtcctctggacttctgtgtagcaccctttgaagggtggagggtttcaagagctcgatgcctgttttggacttctcgctagaaacagatgttgtagatgaagattactactgtgtgccttggaagtgacacagagaattgctactgcacagaccacaaagccaccacttttcagggatattcttacttagttgtcatatgttttatgtctctcttcacgtagtcagaagctgctttagatttgggaaggctggggcttatctgttaccccttgttctaggttgtttctcattstaggttgttacagaggaaaactctagtaggttttgataaatgactatttcttacatcaaagtactatcctgcattatttgggattgtaatacattcctatagtactttatggtcttcaaagcatttgtcactgataagtctcccgtttttcagacagagaaactaaggccctaaggaataagggactggactaaagtcgcattcctagcatgttggatacgttcaagttctctccattctgtaaggaccaactcaagtgcctcttccaagaggtcttttcttagtgtcccctcattactactttttatatttaccacattctaacttgtaatatcatgttcacatacatcttatctaccttaccatgaacttcctaagatcgaaagctgttatgcatttgtgtgtatctcctcacctatcagaattgttcttcttgggtgctaacctgatgcacgttcccacaccagcctgcagtttcctcttctaggctgtggcttggaggtctgcaaggcgctggagtggtgtccaggcacattgtgggcactgctgcacattcaagtgcattgccttatttttaacatatagatacttaatgagagagctttgtaaatgtttataaggtgttttacaaatagatgttatttgaatctcatccttccctcctttatttattgcagttagcactgttctgggcacatagtaggtgcttagtaatgtttgttaagcatttctatattcacttgctccagcttacacttttattccctcctattgttgtatatgactgtctttttatatgtttatatcttgaattcccaactaaactgcaagctccagagggctatagtctcaataaatctttgctgattgcttttaaataatacatgatagcataccagctaacaaagcatggcacaaggtaaatcgtccaatgtgagtgtttttatttaagaaatgttttggatatgtattttaaaatagacatacacatcccaaaaacatatattttaaacagagatcactaaggtaggagggaacacccaggtccacatgaaggggacaaagaatagtgcagaagtaaggctcatgggcactgctggctgagctgcacacagaaaggggtctccagctgatggccattggctacatttctctgtggcattggaagagcttttgtttcctctcagagcgcatttctttagttttttgtttgcagattcttatcaggtggtaagtgtgtgtttttttttttttttttttttttttttgagacagggtctcactctgtcacccaggcatgttcatggctcactgcaggcccaacctcttgagctcaastgatccacccacctgagcctcctgagtagctgggactgcaggcatgtgccaccatgcccagctaatttttgtatttttagtagagacaggatttcaccacattgggaagactggtcttgaactcctggactcaagcaatctycccacctcggcctcccaaagtgctgggattacaggtgtgagccaccgcacctggccatgtgtgatatttttaaagtaaggttgtcattatcacatatcgaggactcttcaacaagggacagcctgaacactaagctgccagaacacacttaaaaacttgatacttctggtacttagccaattggtaagaagctaaagagtctgccatgcagtccaacagccatgctgactaaactcaccagttctttcattgttttgatgttgaacasctgtctttaatacacttttctgtactcctgagaatgttctagttaccatgctgaaatgtttaaatacctacattttaaaattagaactaaaatataatkggtttgttaattaggaggacactggagagttggctgtgagaagttgtgactttgataagtcgatcttttaaaagtaagggcagttgctctacatttgacttctttgtgttctcaaatttaaaatatatggctgaagatgaaagattctgcacacctccacttattcattcccaaatcccacatttcatattaaattcacacaggatactatgtgatgcatatgaaccattttatatgatgcagggtacagtatgcacaggggataatttattttctaaatttgctattattagacttytaattactcagctggatagaagcagaaaggtctcattcttgtactaactgccgatttttttttttttttgagacggagtttagctctgttgcccaggctgtagtgcagtggtacaatctctgctcactgcagcctccacctcctgggttcaagtgattctcctgcctcagccttccgaatagctgggattacaggtgtgcaccaccacggccagataatttttgtatttttagtagagatggtgtttcaccacattggccaggstgatcttggactcctgacctcaagagtcccacctcggcctcccaaagtgctgggattacaggtgtgggccatcatgcccggccactaactgccaattatttagccagagatgacaggcagaaggaattcattttagattgttcagacttaagaagtaacatttctttccaaggaggtctaaacatatgtgtgttttattttttaatagccccagttcttcacattttaattaatcaaacaaaacctgcaatttaagaaatatctagaaatgattggtccaattgtcctcctttgtgctcacgtctctcatggaggaaagtcaggattcactgtggttatgaaaggaatctgtacaatatatttaccttctgtaaaatacttggattaatattgttaagcatctctagggaacatggcattcaattagtttttatttcttgtcatctctcactagagaaagagcgcacacttctgtttccctgaggaggtaaacttgcttgaaaagtaaaatttccattaaaatctctaatttggctttcttaaatataaatctatttttgttacattttaaatagtcttaaggctaagtgactaatgagtacagtaataatatatcattctcttttattcatctgaaaattatactgtctcgagagacctgagttttgtgtgttttgattttatttcttactaaaagacttctctgtgattggagggagctgcaaagctgaggcaagtgtgggactcaggggaccctgcgtggatttgcagaggaataagagacttggtttcccatgggatagagaatttatgtttaagcattgaaagagttcttcgatgtgcgaggtgttatgcggagtgctttagttgcactatttcatttattcctcataatcctaagggatagtatccccattcctatttctgtgaaaattggaaatctaaatatggatgaggagtgctttttaatgagaacaccccatttcccggccatgacaactgcatgtttgctcagaagtgtggagttgctgggtgggatgctaagatgacatactgtttcttttttttttttttcttttatggacttgcagtttgaaacaggcagtagagcccagaaagtacatataaggcactcaattgtactgtttaacacaagctgatttttaaaaagttaaattttcaagaagtcttcctctagtaactgtctgggggtataacgtgtttcatacccaccctatttgatctcttcattgtgaatttcttaacaccagggcactgctttaatcaaaaccatttagaggcgttcactttaaaaaataaaagttgcagaagattgggggtggcatttcccctgtcgtcatgtgatagcgaacacctgagaaatcttttaatgcccacagctctagattataggtgtgcccttcaaaagcatcacagaaaaacaaaagggttacccaccagtcaagggtttgggacattaacatgctttagttgaaagttatattatgaaaaatgtcagaaaaatgcatgaaaggaaaattgttccatgagggaaatactactgctgaaactccaagtggaagatgatgtttttaatattcccttagttccacatttgtgtagttctgtagtgaaacgagtcatttaagaggggaggtggcccaggctaaaaataaagtttctttgaaaccagatgagagtctagctatgccaaaaatggaatccggactctgttcactctcgagaatgtaaataagtagaattttgtgtcacataaaatagtctatgcaaaaaaggatattcactgccttttgtgatagagactaaaataaccatcaggagtatagctgttctggggactctgaagcaacagtgtaaaatgatatggtagtctaacgtattctgatttagaaagatgtccaagacaaagaaagtgcagaacaacaagtactgcatgatttcattttatgtacagatgtatgaatatgtgcagttactggtatattcatgcatagaaaaagaactggaagaataaacatgaaaatattaagtagagggaatgaaagttggagagtaaaggaggattttggtgggtttactgtgtatgtttctctttaaatcttcacacacacacacacacacacacacacacacacacacacaattaataaaactatagaaacaaggaaagcaaagcttgaaggtctcagtgaagctgtatagtggttaagagtatagactctggagtaaaaactgccaggatttgaatctcagctccttgacttactggctacacatccttacgcaagtaatttaacttctgtgcttcagtttactcaaatgaaagtcaggattaagggtacttgtgtcatattgttgttacaaggattaaataagtaatccatgagagagcatatagactagtgcctgacacatagtaaatatttagcatgtattaattattataaattataatacttaggcaatgtctagctatattcaattctttgtgcaaactttttagttaaaaatgtttttagtgacagcgttagtgatcataatgtatttttccaaagttttcattgtcattgttaatgatattgtcatttttttttacctcatgggtgttcagaacttcacaaagaagaataacaaaaacagagttatctgattttacttagagtgccatacattccactagtggagtactcctgaatttgcatctttgaccatgtaatctaatgtacatattactagtaaacaatagaaatgtaaatacataatgaggcttttctttgttcctcaggaagactatgaccgtctgaggcctttatcttacccaatgaccgatgtcttccttatatgcttctcggtggtaaatccagcctcatttcaaaatgtgaaagaggagtgggtaccggaacttaaggaataygcaccaaatgtaccctttttattaataggaactcaggtatgtctggtttgattttctgcattttagaataagctctttggtctgtcgtagaggctgctctcagacaaacagtcccaaagctgagcaaatgatgtaagtgtttaatctcagctgcaagttaatgagttctatcatatttttggaaaaaattgtgccaaaagaaagcaattattttcctggtttttaaaaattaagttcttttgtttaatctttttttggtatgtgggaattaagtgggattacatgctttgatttttctttaaagatttgtaatattatgggacattattgacctttcttaattagattgatctccgagatgaccccaaaactttagcaagactgaatgatatgaaagaaaaacctatatgtgtggaacaaggacagaaactagcaaaagaggtaatggaacactcacagaatttaagcatgaatgtaaaagatgctaagataacaatagaagctaattttattgtgtatttactgtgtgccaggtggagtgctttacatgcattatctcatttaatccttgcatgaactcagtgaggtaggtctgtttcccctgttacacagaagagacagtggaggctgggagatgtcagataattcgcccamgatsctgcaggtaataaatggcagagttgggtttcagtccaaagcctgactcctgggccgagactcttacacctttgctacattgccagtgatattttcctaaaaagtcacrtatggaaaaaagcatcggaaacacgtgtcactactttcaacccttcttcattacttaaacagttgcactgtgccaaatcagctctgtcttaagactcattgagttagacagtggagccacctaggatgacagtttaaatttgtggttaaaaccaaaaaatgatgactaggtttgaaaagaaatgtgttgaaatttctccaatctttttatgaaaagaggatagaaaatacaaaaattctaaaaatatatgtaacagtgatgcatgcaataccttgtagcttatcttccttcgtgccccaaagataggtttactttttccccttttttcccatttggccttaacattattggattctattttttaaatgttgtgatttcaataggacttttgtggaaacagaatccatatatggtctttttttttttttttttttttgagacggagtcccactctgtggcccaggttggagtgcagtgacgggatctcagctcactgcaagctctgcctcccgtgttcatgccattctcctgcctcagcctcccaagtagctgggactacaggtgcctgccaccacacccggctattttttttttttttttttttttttcatttttagtggagatggggttttaccatgttagccaggatggtctcgacctcctggcctcatgatctgcccacctcatcctcccaaagtgctaggattacaggcatgagccaccgcgcccggcccatatatagtcttttaaaatgtagtatcaggaggcaaaagaaagcaagaaaactttctggaggacagtttttcctaaagcaaaaaataaatggctttactaacaaatcacttcagaaattccatgtattcagttttgtaatcttggggagagaaggaatttctaaatgtcataaagataaaagccataaatgaaaatattaatgatttcactgcataaaaacttaataccacatcaaatgccagaaataaaatgaaaagtcatataacctgagatggatggcagaaaaatgggttaacatccttagtatacaggaacctcttgcatatgagttaatcagaagcagccacagataccaatagaaaaatgggctaayaatgaaaaattcaccccccaaaatgcagattgccattgaagataggaaatatgttcaaacttattagtagtcaaatgtaagctcaatttgcacctatagaattggcaaaaaatgagaaattaattataatacccgtgtagtaaaatggacactctgttgtactattggtcattgaatcaaagcagtcttgacagtaygcaaaatccttaaaatcatggacacttttgatcaagcaattccatatgtaagagtttatcctaagcaaatcattaggatgttggtcaaagtgtacagtgttaggaggaatacattttttgagataacactgcacaacatggtaactacagttaataatggtggtgctgggcacggtggctcacacctgtaatccccgcaccttggaaggctgaggtgggtggatcgtttgagcccaggaattcgagaccagcctgggcaacatggtgaaaccccatctctaccaaaaaaaaaaaaaaaaaaaaaaaaaaaaaaaaaaaaattagctgagcatgatggtgcatacctgtagtcccagctacttggggggctgaggaaggaggatcacttgagcccaggaggtggaggttgcagtgagccgagatagtgccattgcactccagcctggatgacagagtgagaccctgtctcaaaataaatgaatraataaataatggtggactgcgtatttccaaattgctaaaagagtaaattttaaatgttctcaccacacaaaatgataagtatttaaggtgatagatgttaattatgttgatttaatcatttcactcgtgtgtgtgtgtatatgtatatatagagagaaaatattgctttgtacctyatataaaattataatttgtccatttataatatttaataataaaagtaaattattagggacgtacttagagctacaaagatgctgaattgtttataatggcaaaaattccctgcatctattaaaacttcatactatctgttaagatttcatatttattatgtagctaaagggaaaaaagtagttgcaaaacagtatgatctcatttctagactcatcagcatttggcacagttgcgtccttcctgaaactttcttcagttggactctcttggtttttctcccctctcattggactctgctccatctctttacctccttggtccctggttggagggccccagtgatgagcactcagctttgtggatgtcttcttctatagctacactccctaggcctaaatgagcttctgtcagtcttgtagcttgcacagtctacaaccaaagattcctggatttccatctccagcctggacctctttcctaaattctcaatttggttatccagctgtttactcaacaagtccatctacatggctgagtatctcaaaattaacatgtctaagatatgattcttcttttaccctccaarcctgtcctcccagttactcaggtcagaagccctcagctgggtgcagtggctcacacctgtaatcccagcactttgggagcccgaggcgggcagaattacctgaggttgggagttggagaccaccctgaccaacatggagaaaccccatctctactaatacaaaattagctgggtgtggtggcacatgcctgtaatcccagctagtcaggaatctgaggcagaaccgcttgaacccagaaggcagaggttgtgatgagccaagatcgaaccatagtactccagcctgggcaacaagagtgaaactgtctcaaaaaaaaaaaaaagccctgaagtcgtacttgaccttgctctttctcccataccacacatctagccttcggcacaacataccttcagaacatatccagaatccagacacttttttctaactcttccctctatcacctggttcagacctcctccatctctggcctgctttactggaatagcttccaactcacctttctgcttctgtctatgccccatggtcatctgttctcaacacagcagccagagtaagtcttaaaaatgtaagcgcaatcatgtcactgctctgctcagaatcctccagtgggtccccagctcagactaaacgccaaagtccgcacagtggcctacaagcctctgttccctctctgccttactcattgttccccaggcctcctggtctcctttgttgttccctcaaagttctacctgagaacctttgtacttttgttgttccctctgcctggaatgttcttccctatggacatgattcattctttcactcttttcaggtctctgctcaaataccacatcctcagtgtgatcttgttccttgactgctccaggcatgctcctgcatcaggatctatctgcctggagctcttcccctaggtatccctcactgctcaaacttccccattgagaagcctccccggacccccactaccattgtcctcagcactccccgcctccctcactctgctttttccccacagcatttgcaaccatctgctctgtattccctcccctgtgcctcttacccagcagatgtcagcacatgtggacgccacacagcagggactctgctctttcgttcagttcactgacatatccccaggacctaaacagtgcttgacatatagtagatacccagtaaatatgtggtgagtgaaataatttttcatagaaagtctggaaggacatatactagtattttaaaatcccctctggggttatgaacatggatgatgaatgtattctttttgcatagctgtattttataattttcttyataatgatgtgtttatgtcatgccaattgtataaacatgatcttatatatttgtgattttttttctccctcccagataggagcatgctgctatgtggaatgttcagctttaacccagaagggattgaagactgtttttgatgaggctatcatagccattttaactccaaagaaacayactgtaaaaaaaagaataggatcaagatgtataaactgttgtttaattacgtgagaaacatcttcagtggccaaggaaactgtccatttctctcagaaagcaaatgaaatgctacagctatacccagaccttttataggtaatgaagcagttcaaaacttgaaagaaaacaaaacctgtcctcagaattctataaagtgtattaagaatgttccttaaaggtttaagaagcagtaagcagcatctgaagccacaatctattataaatactttatttcaactagaaggtacaatctctcaggggtttcatagtttaaaaagctacaatcacatcatgttgtaactacgtaaaaaacagagctgtaaatggaactgcttggctttgaccatacmcatttctgcccagcccttacagaatctgcacaaagaaatatctccctttgctccrgttaattgttctkgtatgtaagttgctttctattccagtatatccagagtggtgaaataacaaggccagccacgtagccaaaggtcgctccaagcgtacaggagatgggccatacctgaggagagaatgtatgagatcaaaaaagaacaaatgttttattattacttgagcacaagtgtaacctaaatatttctatattaaagcttaatgtgctttcttaaagaatgccaaaagtgtaataaggtcataactgcatttatcatgaacactaaaaatgtacacattttagttartgtgyattaaactgtaacaaggcttctggcaattgtagatttagtttgacgctccccaaagtgcatgagacacatgctaaaattacaaattaaaattttgggtcagactttgccataatgatagactcaatttagctctctgaactagttggtaattttttttttttaattcccactttggctgtgtacatcaaatgaaatgagaagtgtgtatgctgaccaaaccacaagaaactttctttaagttgtgttaaagaggaaagacctagaatccaagcgtgttacatgaaaattgtaacagagcagctgcttccacctttcagatatrgatgytggraccacagcagaagttatagagcgasaacttayatacacacctagaatgtaagttaaacaaaataccggcttcsagagaccccttttctccagccatattacatcaggctagaagtaattaatgttgatttatttcatctacaagcagttggtccctaagtgaaaggctctgcttgaaaaaaaaaaraaaaaaaagttggaggaaaattttcatgttcttctgtgaagcttatttggtacactggagccatttctaatctttctctggggggaacaggccacagaactgtgttagaggtgaaccatcttaattactagttctattacctaattcagcttccttgtttggtctgctgtggatctgccttattgcataygccatgcatcagataatggatgcatcagataatggtgttagacaaagcttcattgtgaacaacctaatgcattttagagaaacaatctcatcacattttttctagcctttcctacatttaaacttgctgttgcccaaattataattttttaaatgtctttggtgggcttctgttaattcacatgacttgagcttatagctatgtctactgcacagattgggtaatggaacactaaacttttatacttgaaaatgacagccttaaatgctcatatcagtcacaaatctaggatgtactgtcttgttgtatgtgagctttgtagagatttttaaaaatataagcatcaccttcccattgaagagtggagagagtctactggatgactggccaggaactttctctctgaatcggacatttggatgtcttctttcttccaagaaatggtggttcacattaaagtatcatggccttatgtatgctcaaatggaatcttatgtaactttcttatttaattttggtctgcttatttttagataaaattgaaaggaattgtataaatcaattaacatattagctgagttgtccaacacatggtataaacgaattacaacagtaaactattacacatttccaacttgcctttggggatttatgaggattttttttggtggggggagggggctccaattcatatctctgaaacccttcacacttggtttactaattcaaagttagaagtctagaatttgccctgccctaacagaaacagattaggaatttgtctacacaaactggtgtcacctgtttcttgactgggatttggtttcctcattataaatatgggaggtagaacagagatctccaacgtctctcccatttatcacagtaattttcttattcacagtaatcattgttggatgttaccttttcagcttcacattctcaagatggtaaaaatcatgtatatagattatcagaactctaagcaaagatgactgtcacatctgaagctgaggtgccttaggtactctactgaccttgatgggtttggagttccccattgcttatcaagagctttttaattgctttggttctttagtttttctttttgcaaaaatccttcctgtcactttaactaaaaaccaaagatttgttttctattgataagcagactagagaaaaactgccttattttcagaagcatgtcttcattcaaagcttaggcttcaatagaaattcagactaatcactgaaatgactatttcaaactagtgaaatatctgggaaataaactgcttcaaaaatattttactgacatgaattttgctagtgaatacaaatacactgcctcaaataaggccatgtatgaatgaacttacaagatatttgagttaatcagtgtttgcatatagagaattagttctaaagttcttaaaaataaatttaggggctccctgaaattttatttaatactttgctaacttacactcttgttttatctccacaggtacattttaggttagctcatggtgaattctatttacaataagtggagcttggattaatgggttttgttatgaattatcttagtgactttagacactgtttccatttgatttttaactatttaaaataccaaattaaataccagtttgttggttgttacttttaaatgattgttactttaacagtgtcccttcttaacacatggggttacaaataaaatactatgcatagtttactatctacgtaaagcactgaactttttaccttagtagtttttatttattaccctatgtaaacatttaggataatactctttcctctatttatgctgagagtctactaatcattggcaaagtatgagtccctatactctgttaaaaaaagctcactgttaaagtatagggagaatagtaatccctcatgaatcccagctagattccaatttgggttactaaattgtattttaatcattttgtaatttcagtatggctctttgttctcaaacacatacataccaccacgcacattcttttaaacagctgccacacctcacctccaacagaatgccaaaaatgaaatgttaaaaaattttgtctaatgaagggttacggcttggaacacttggttattcatgttatgtaaatcaagaagtgcatgccatcagcaaattaaaatgtggactggctttgaagactgttaatgatgggtcaggctttgtacttacaagagtacctccttggctttcctgaaataagcatttcttaatcgtaaccctgtcatttttttaaaagagaatttctttaagggccgttttcatgatttttgaagatcaaaatagattatcaaaatagggaacagcaaaaggagggaggctgcccactaagaactattcctcaagcaagtttcctactgattttcttataattattctaaaaatttttaaactacactatggcaacagaattcatttgtaaatcctagcttaatcaggtattttcataattagatcctaaggttttcctttaaaactatttccttatctcacatacagacatgtttctattcaacgttcttcatgccacaaataggattttttaaaaaagtgatatctattaaatacataattcagctgcactgctataaagatttctccaaattatggtaatctgagatggctttatataattattttgtttaaagaaaataggaarcttagaacaaagacattcatgtaaaggaagtcattcacaagtgtttgccaccaaaatgacaagggcccaagcactggaggccagcctgggcaagatagtgagagttttttataaatttacatttttttagccagtaaatagaagaaacaacctatggtgtataatcaaatatattacaactcaagtgggtaaaattattaaaattaccaggaagaagaaaaatctaattaaaaaataagtggtacatcagatgttaagtgaccttagccagctcattttaacatctgagcctcagtttcccctacagaacagggacagaagtacctactatacttaaaatgcagggctgaagtaatctcttaaaatttgtcatgaaagctataaagtaccacgtaccagtattctgtatattacatgttttaacttgaaaaaattaaacttacacaaacagtatttctttggtcactgacactactatgtaataagtagaaccggcagtttagaacgaatagttcatgagtaatatactgtgtggtaggaagtggtaggaactattctttacccttgcaaagcaatcatcttttttttttttgagacggactctcgctctgtcgcccaggctggagtgcagtggcacaatctcggctcactgcaagctccgcctcccaggttcacgctattctcctgcctcagcctcccgagtagctgggactacaggtgcctgccaccacgtccagctaatttttttgtatttttagtagagacagggtttcaatgtgttagccaggatggtctcgatctcctgacctcgtgatccgtctgcctcagcctcccaaagtgctgggattacaggcgtgagccaccgcgcccagccataaagcaatcatctttaatacatgctgttcttcatgtgaaatgtctgttacaagagcaaattcaggagctgtacaacatactggcattacgttaaccatctgtatccttacctcagaaggttaccctgctgctagctgtcatttttcataaattcgaagaaacaaaattttaagtacagatagtggttttaaactaatcattggtaggcatttgtgttaatttttaaaggctcatatgaatgactccattcattcgaaactatttgtggagcccctaccttaacccagcagttaaaggtgtaaactaagattaaattatttaattttggatacattttagtataaattcttaaaaatgtgttccaatataataaatattacttataattttgggggagatttacactgtcacagataacatggagaaactgacctatctgcaaatcagaacacctacagacatttagaacaactcacaaccattaggattactgtctctctcgagataaaaaggaagataaaatccagttctcaatctctcatgagctacttttcaatatgtttgttttgttaattgtgcttatcacaaatttgcatttgcatgactgagagagttcatctttcaaagcctgctgacctactggttataaataatcatttatattctcctccaaaattggtcttgaacagtatgtttttccagatattcctaaagtaaatgttattgtctgatacaggaatacatgcacaaatgaatctactcattgggatacatttctctagttaaaaatctacactcatccatgtatacactctcctgtgactaagaatactactttaggaagagttatttgcgaaggggtgtgtagttcctggtctggaattcttgtcaaaatgacactaaaaggttctggtcacaactcgtgcaaacgagttaacttggccagcattattctctctaacatgaaagtcctgttagcagagcattatcaacatgattaccctacgatgaacacgccttttcaatccaaaaccatttcatgccagttcaatgttaacacatttttctcatgcttgaaacatacaaaccatattcatataaatgagtattttattttggtctaaaacacagtatcatccctttggtaatggaaataccaattaacgtaaaaacctgcagctcttcaatcaatcaaatccataatcttagttttaatctccctccagcattttgcagtaattcatgtagttataatcctatgattcctagtttcaacttatgaaagaattatctgtggcatctgtgactttaggaaatgaatatacatatttcacaaatactagatttctaacgtggtaaaactgaaaaaaaaaaacccaaaaaatttttaaatacaacaatgcctcatttatctggtgtctgttgagaataagtacaaatattttaaaacaactttaaattgtttcaaagacgatctcaggtgtctaaaattcaaaatctccaaattcagttatttaaaatactttatatcaattttcctttttaccttcgtaagaaataagcatcctagccgagacttgattatttggttcaaatatttttaaagattgtagcactgaagtccatagtttaaaggcatgtgtggatttgttagggacaaaatcattgcatattagctttaaatattctcctacaaataaattacggcctaaaatacagacaccaccacaacggtcaaggcatgtaatgaaaacaatgtggggaaagaaatgaaatataataagtaatttagctattccaaagagacctaagctatgaccattttttaaaaagaaaagctatgttttagtttccagcaatgaaaagaatcatggtgtagtggggctctcatgtgaatcttaagtctccctcttcccacctgagtaatgctaagcaagatgtgtactcctcccctctcacacttggactttctagtgtataaaatgggagtaaaacctaccttgcactacggttgtcaggattaagttactcatttcacagtaccaagccccctgcagggtacatggagagatctataagtgctacgttttctttctactgtcatctgaaatgtcagacaggattgaaaattatgtgaaatccaaataccctaaattggcataactaaataccagagaaatagataaattaacagtccactctaccaactgaaagactgctgggcagaaaaaataaaacaacaaactgagacaattaacatattctctaatatatgagaactcaaataaatcatggaatttgcattttttgaaggctaaaaatatagtcattaaactatgtcttttctaggtcacaaatgcctgtaacattaattaagtaataaccatgtgtcaggtgctgagctaggtattttagagggattttattatttcatcctcactagcaagtgacaaagccaggatttcaacccagtaatctgatgccagaactcctaatcatcatgttacctgcctacccattaataaaacgtgagtttaaaaacctcatggtcaatttcctgtgctcagaataaccaacaatatttcttaac

SEQ ID NO: 94430 - DNA, 13683 bp, Homo sapiens
cttttctcattttgctacaaaccaatgaaaacactcttttggtggggggtcattctagagtagcactggcccccagactacattttggaatcactgatccaggacaaacttcctctgatgcttcaatacctgctttgccatttctgtcccagtgtcactcctcaatttcctgagcataaatgtcactcatgcctcttctccctcaacaatgggatggatcacttcctgcccggtgttgccacatcccttatgcccattattatcttaacacaataacatgaccttttcactgtttacatgtttctcacagcagttcttaagaaaaggtttatgaggcaccatatttgttaagctaatactttatttgtggagagaaaatattgaactatatattttcagatatattaacaaaaggaaatagactgtatctaggtccaagacaaatattcgattttttttttttttttttttttgagacatggtcttgctctgtcacccaggctggggtgcagtggtacaatcatggctaattgcagccttgacctcctgggctcaagcgatactcccacctctgcctcctgagtagctgagactacaggcacatgccaccacacccagataattttctaattttttttagagatggggtctcactatgttccccaggctggtctctaactcctgggctcaagtgattctcccacctcattctcccaaagtgctgggattataggtgtgaaccactgtgcccagtccaaataaaatttatgcttcttataaaactatgtctaacactttcatatctctgatattgagtgcatccttcattcaatggcatatcatagtttgtatttcatcttgagtggtacataaaacaatggtgcattttataccttagatttggtgaaaaaatgctagctctgacattagcatagagttggtactctgaaatgagaactccctgcaagcccataggcttgagctccaatccaagatcatgtactagacatgtgacattgggcaaaccacttcatccctctggacttcagttttcatgcagtaaaatgtgaataacaaggccaggtgcggtggctcatgtctgtaatcccagcactttgggaggcgaaggcaggcaagtcacttgaggtcaggagttcgagaccagcctggccaacatggtgaaaccccatctctaccaaataatataaaaagyaggtggctgtggtggtgcgcaactgtaattccagctacttgggaggctgaggcaggagaattgcttgaacccaggaagtggaggttagagtgagctgagatctcgccactgtgatccagcctggacaatgcagcaagattccatctcaaaaaataaaaataaaaatgtgagtaacgagctctacctcacaggactgttgtgaggagtgaaatgacaagagcaaaatgagaatgtacatgaatatgtgaaaggtgtgattatcattaagaaagattatctcaaaaacctggatttctctttactaccactgccatcagcagctcacctcagctgggaagccccaaactcaatcaacaggtgtgtatagcacccatattttattcttcatggattttttactttcctatttggcctgtgcaaaagcccccttgctttacataagcccttctgctacatactaaggtatacttacacactgcattgcttatgtgaggattcagaagatatttattgaaagacagaatgataaaatgtttacaactccaagaatagacctgaagtggacctataaccagggtctgctagagattaaatgattaaatgaaagtgtttggtattctaggagactgctagaaccaaatttaaaaaacaaaatcccaacatgctttcatgttaaaagccctcaacaaactaggcattgaaggaacatacctcaaaataataacagccatatatgacaaacccacagccaacatcatatggaatgggcaaaagctggaagcattccccttgacaaccagaacaagacaaggatgcccactcccaccactcctattccacatagtgctggaagtcatagccagagcaatcaggcaagacaaagaagtaaaaggcatccaaataggaaaagaggaagtcaaactgtctctgtttgcaaacaatataattctatacctagaaaaccccacagtctctgcccaaaatctcctagatctcataagcaactccagcaaggtttcaagattcaaaataaatgtacaaaaatcagtaacatttctatacaccaacaacgtccaggctaactgccaaatcaagaatgcaatcccattcacaattaccacaaaaagaataaaatatctaagaatataaccaaccagggaggtgaaagatttctacaatgagaattacaaagcactgcttaaagaaatcagagacaataaaaaacaaatggaaaaacattccatgctcatggataggaagaatcaatattgttaaaatggccatactgcccagagcaatttacacaatcattgctattcttatcaaactactgatgacattcttggctgggtgcagtggctcacgtctgtaatcacaggacattgggaggctgaggtgggcagatcacttgaggtcagaatacaaaatacaaaaatacaaaactcagctgggtgtggtggcccatgcctgtaatcccagctactcaagagactggggtaggaggattgcttgagcccaggaggtggagtttgggaccagcctgggcaacatgataaaaccctgtctctactcaaaatacaaaacttagccggctgtggtggcacatgcctgtaatctcagctactcaggtaggaggatcacttgagcccagaaggtggaggttgcagtgagccaagataacaccactgcactccagcctgggtgacagagggagattctgtctcaaagaaattaattagtttaatttaatttaattcatatggaatgaaaaaagagcccaaatagccaaagcaatcctaagcaaaaagaacaaagctggaggcatcacattaccagacttcaaactatagtgaaatgctacagtaactaaaacagccgggtactggtacaaaaacagacacatagacaaatgaaacagaatagaaagcccagaaataaagccacacacctacaaccatctaatctttgacaaagttggcaaaaaacagcaaagggtaaaggactccttattcaataaatggtgctgggacaacttgatagccatatgcaaaagattaaaactggatccctttctcacaccatataaaaaatcaactaaagacagatcaactaaagattaaatgtaaaacccaaaactataaaaccctagaaaaaagcctaggaaataccattctagacataggtcctggcaaagatttcatgatgaagacaccaaaaccagttgcaacaaaaacaaaaactgacaaatgggatctaattacggtatttaataaagagcttctgcacagcaagagaaactatcaacagagtacacagacaacccacagatatttgcaagctatgtatctgacaaaggtctaatagccagaatctataagggacttaaaaaattttacaagaagaaaacaaccccatcaaaaagtgggcaaggtgtgggagtcaccaagatagctgaataggaacacctccagtctacagctcccagtgtgagtgaagcagaagatcggtgatttctgcatttccaactgaggtaccgggttcatctcactagggcttgtcggacagtgggtgcagcccatggagcagggtggagcattgcctcacccagaaagtgcaagggataggggatttccctttcctagccaagggaagctgtgacagacggtacctggaaaatcgggacaccaccatcctaatactgcacttttccaacggtcttagcaaacggcataccaggagattatatcccatgcctggcttggagggtcccacacccacggagccttgctcactgctagcatagcagtctgagatcgaactgcaaggccacagtgaggctaggggaggggcgtccaccactgctgaggcttgagtaggtaaacaaagcagcctggaagatcgaactgggtggagcccactgcagctcaaggaggcctgcctgcctccgtagactccacctctggggacagggcatagctgaacaaaaggcagcagaaaaggcagcagaaacttctgcagacttaaacgtccctatctgacagctttaaagagagtagtggttctcccagcatggagtttgagatctgagaacggacagactgactcctcaagtgggtccctgacccccaagtagactaactggaagacacccccccagtaggggccgactgacacttcaaacagacaggtgcccctctgagatgaagcttccagaggaaggatcaggcagcaacatttgctgttctgcaatatttgctgttatgcagcctctgctggcaatacctaggcaaacagggtctgaagtggacctccagcaaactccaacagacctgcagctgtgagtcctgactgttagaaggaaaactaacaaacagaaaggacatccacaccaaaaccccatctgtacrtcaccatcatcaaagaccaaaggtagataaaaccacaaagatagggagaaaccagagcagaaaagctgaaaattctaaaaatcacagcacctcttctcctccaaaggaccacagctccttgccagcaacagaacaaagctggatggagaatggctttcatgacttgagagaagaaggcttcagaagatcagtaataacaaacatttccaagctaaaggaggatgttcaaacccattgcaaagaagctaaaaaccttgaaaaaagattagatgaatggctaactataataaatagtgtagagaagaccttaaattacctgatggagctgaaaaccaaccaagaagacaagtttagagaaaaaagagtaaaaagaaatgaacaaagcctccaagaaatatgggactatgtgaagagaccaaatctacatctgattggtgcacctgaaagtgacagggagaatggaaccaagttggaaaacactcttcaggatattatccaggagaacttccccaacctagcaaggcaggccaacattcaaattcaggaaatacagagaacaccacaaagatactcttcaagaagagtaactccaagacacataattgtcagattcaccaaagttgaaatgaaggaaaagatgttaagggcagctatagagaaaggttgtgttacccgcaaagggaaacccatcaaactaacagcagatctctcagcagaaactctacaagccagaagagagtgggggtcaatattcaacattcttaaagaagagaattttcaacccacaatttcatatccagccaaactaagcttcataagtgaaggagaaataaaatcctttacagacaagcaaatgctgagagattttgtcaccaccaggcctgccttacaagagctcctgaaggaagcactaaccatggaaaggaacaaacggtaccaggcactgcaaaaacatgccaaattgtaaagaccagcgatgctaggaagaaactgcatcaactaatgagcaaaataacgagctaacatcataacgacaggatcaaattcacacataacaatattaaccttaaatgtaaatgggttaaattttccaattaaaagacacagactggcaaattggataaagagtcaagacccatcagtgtgctgtattcaggagacccatctcacatgcagagacacacataggctcaaaataaagggatggaggaagatctaccaagcaaatggaaaacaaaaaaaggcaggggttgcaatcctagtctctgataaaacagactttaaaccaacaaagatcaaaagagacaaagaaggccattacataatggtaatgggatcaactcaacaagaagagctaactcctaaatacatatgcacctggcactcccagccggccacagcctgacacgccgcgcggccccccagtctcccgcggccgctcccccaggcatggcacrgggcctcgcctcactatggcagcagcacggcacagcacgctcgacttcatgctcagtgccaaagctgatggtgagaccattctaaaaggcctccagtccattttccaggagcaggggatggcggagtcggtgcacacctggcaggaccatggctatttagcaacctacacaaacaagaatggcagctttgccaatatgagaatttacccacatggattggtgttgctggaccttcagagttatgatggtgatgcgcaaggcaaagaagagatcgacagtattttgaacaaagtagaagaaagaatgaaagaattgagtcaggacagtactgggcgggtgaaacgattaccacccatagtgcgaggagagccatcgacagatattggcccaccgccgatgggcgcctggttgaatatgacatagatgaagtggtatatgatgaagattcaccttatcaaaatataaaaattctacactcgaagcagtttggaaatattctcattcttagtggggatgttaatttggcagagagtgatttggcatatacccgggccatcatgggcagtggcaaagaagattacactggcaaagatgtactcattctgggaggtggagacagaggcatattgtgtgaaatagtcaaactaaaaccaaagatggtcactatggtagagactgaccaaatgatgattgatgggtgtaagaaatacatgcgaaaaacgtgtggcgatgtcttagacaatcttaaaggagactgctatcaggttctaatagaagactgtatcccggtactgaagagatacaccaaagaagggagagaatttgattatgtgattaatgatttgacagctgttccaatctccacgtctccagaagaagattccacatgggagtttctcagactgattcttgacctctcaatgaaagtgttgaaacaggatgggaaatattttacacaggggaactgtgtcaatctgaaagaagcactgtcgctctatgaagaacagctggggcgcctgtattgtcctgtggaattttcaaaggagatcatctgtgtcccttcatacctggaattgtgggtattttacactgtttggaagaaagctaaaccctgaagatcagtagcccctaatcacatgtgctgcaaatagccttcctgacctccatatgctgtacatgacatcaaaatgagtcaggcaattgattgtgaagtccttaaagttttcctttttttagtaattatttttaatttaaaaaagyaaatggaaaatgtatattttgatgagcttagggtgttttttttgaaagtcagctgaaggatggttagacagcacagcgaagactgctaaatgcactgacccccccattagaatgtgatttttgttcctttttatttatctgtgggcttttgtttttgtttttgttttggtagatcttcagtttggatatttggaggagtgaacatcgttgttttgctggagggaagatcttgatggtgtttctttccccaaaaattgacttagatattaaaaattggtgcttataagagagagttaaaaaaataggattgcttcaattaaaattacaaaagagaaaaaaaaatacatatgcacccaatacaggagcacccagattcataaagcaagcacttagggacctacaaagagacttagactcccacacaataatattgggagactttaacaccccactgtcaacattagacagatcaacgagacagaaagttaacaaggatatcgaggaattgaactcagctctgcaccaagtggacctaatagacatctacagaactctccaccccaaatcaacagaatatacattcttctcagcaccacatcacacttattccaaaatggaccacatagttggaagtgaagcactcctcagcaaatgtaaaagaacagaaattataacaaactgtctctcagaccacagtgcaatcaaactagaactcaggattaagaaactcactcaaaactgctcaactacatgggaaatgaacaacctgctcctgaatgactactgggtacataataaaattgaaggcagaaatgaagatgttctttgaaaccaataagaaaaaagacacaacataccagaatctctgggacacatttaaaacaatgtgtggaaggaaatgtatagcactaaatgcccacaagagaaagcaggaaagatctaaaattgacaccctaacatcacaattaaaagaactagagaagcaagagcaaacaaattcaaaagctagcagaaggcaagaaataactaagatcagagcagaactgaaggagatagagacacaaaaaacccttcaaaaaatcaatgaatccaggagctggttttttgaaaagatcaacaaaattgatagaccactagcaagactaataaagaagaaaagagagaagaatcaaatagatgcaacaaaaaatgataaaggggatatcaccaccgatcccacagaaatacaaaataccatctgagaatactataaacacctctatgcaaataaactagaaaatctagaagaaacagataaattcctggacacatacaccctcccaagactaaaccaggaagaagttgaatccctgaatagaccaataacaagctgtgaaattgaggcaataattaatagcctacaaaccaaaaaaactccaggacaagatggattcacagccaaattctaccagaggtacaaagagaagctggtaccattccttctgaaactattctaatcaatagaaaaagagggaatcctccctgactcattttatgaggccagcatcatcctgataccaaagccttgcagagacacaacagaaaaaaagaattttagaccagtatccctgatgaacattgatgcaaaaatcctcaataaaatactggcaaactgaatctagcagcacatcaaaaagcttatccaccacaatcaagtcggcttcatccttgggatgcaaggcaggttaaacatatgcaaatcaataaatgtaatccatcatataaacagaaccaaagacaaaaaccacatgattatctcagtagatgcagaaaaggcctttgacaaaattcaacagcccttcatcctaaaaactcttaataaactaggtattgatgggacgtatctcaaaataataagagctatttacgacaaaccacagccaatatcatactgaatgggcaaaaactggaagcattccctttgaaaactggcacaagacagggatgccctctctcaccactcctattcaacatagtgttggaaattctggccagggcaatcaggccagagaaagaaataaagggtattcaattaggaaaagaggaagtcaaattgtccctgtttgcagatgacatgattgtatatctagaaaaccccatcgcctcagtccaaaatctccttaagctgataagcaacttcagcaaagtctcaggatacaacatcaatgtgcaaaaatcacaagcattcctatacaccaataacagacaaagacagagagccaaatcatgagtgaactccattcacaattgcttcaaagagaataaaatatctaggaatccaactcacaagggatgtgaaggacctcttcaaggagaactacaaaccactgctcaatgaaataaaagaggacacaaacaaatggaagaacattccatgctcatggataggaaaaatcaatattgtgaaaatggccatactgcccaaggtaatttatagattcaatgccatccccatcaagctaccaatgactttcttcacagaattggaaaaaaatactttaaagttcatatggaactaaaaaagagtccgcattcccaagacaatcctaagccaaaagaataaagctggagacatcacactacttgacttcaaactgcactacaaggctacagtaaccaaaacagcatggtacttgtaccaaaacagagatatagaccaatggaacagaacagagccctcagaaataatatcccaaaactacaaccatctgatctttgacaaacctgacaaaaacaagaaatggggaaatgatttcttatttaagaaatggtgctggtaaaactggctagccatatgtagaaagctgaaactggatcccttccttacaacttatacaaaaattaatttaagatggattaaagactttaatgttagacctaaaaccataaaaaccctagcagaaaatctaggcaataccattcaggacataggcatgagcaaggacttaatgaccaaaacaccaaaagcaatggcaacaaaagccaaaattgacaaatgggatctaattaaactaaagaacttctgcacagcaaaagaaactaccaccagagtgaacaggcaacctacagaatgggagaaaatttttacaatctacccatctgacaaagggctaatatccagaatctacaaagaacttaaacaaatttacaaaaaaaatcaaacaacctcattgaaaactgggctaaggatatgaacagacacttctcaaaagaagacatttatgcagccaacagacacatgaaaaaatgctcatcatcactggccataagagtaatgcaaatcaaaactacaatgagataacatctcacaccagttagaatggcgatcattaaaaagtcaggaaacaacaggtgctggagaggatgtggagaaataggaacgcttttacactgttggtgggactgtaaactagttcaaccattgtggaagacagtgtggcggttcctcaaagatctagaactagaaataccgtttgaccccgccatcccattactgggtatatacccaaaggactataaatcatgctgctataaagacacatgcacacgtatgcttattgcggcactattcacaatagcaaagacttggaaccaacccaaatgtccatcaatgatagactggattaagaaaatgtggcacatgtacaccatgaaatactatgcagccttaaaaaaggatgagttcatgtcctttgtagggacatggatgaagctggaaaccatcattctgagcaaactgtcgcaaggacagaaaaccaaacaccacatgtcctcactcataggygggaattgaacaataagaacacttggacacagggtggtgaacatctcacactgggacctgtcatggggtggagggaggtgagagggatagcattaggagaaatacctaatgtaaatgacgagttaatgggtgcagcacaccaacatggcacatgtttacatatgtaacaaacctgcacgttgtgcacatgtaccctggaacttaaagtataataaaaaaaaaacaaaacagaaacttggggtggggttgaaggtagtgacttgatatttactgagctatactggaattcaaatgtagttcttctctttcaaagaataaaatctctcttaacttcaaaaaaaaagtgggcaaggatataaacaggcacttttcaaaagaagacatacatgtggccaacaaacatatgaaaaaatgctcaatatcactaatcactaaagaaatgcaaatcaaaaccacaatgagataccatctcacaccagtcagaatggctattactaagaagtcaaaaaataatagatatggttgaggttgtggagaaaagcgaatgcttatacgctgctggtggcaatgtaaataagttcagccactgtgaaaagcaatttggcaatttctcaaagaacttaaaacagaactaccattcgacccagcaattctattattgggtacatgcccaaaggaaaatcaatggtactactaaagacacatgcacacgtatgttcattgcagcactattcacaatagcaaagacatagaattaacctaaatgcccatcaacagtagactggataaagaaaatgtggcccatacataccatggaatactatgcagcccataaaaaggaacaagatcatgtcctttgcagcaacatagatggaactggaggtcattgtcctaagcaaactaacactggaacagaaaaccaaataccacattttctcacttataaatgggagctaaatattaagcacacatggacacaaagaagggaaaaacagacaccacggcctactggagggtggagggtggagggtgggagaagggtgaggatcaaaaaactacctatccggtactatacttattacctgggtaacaaaataatctgtacaccaaacccccacaacatgcaatttacctacacgtgaaatctgcacatgtacccctgaatctaaaataaaaattaaaaataaaataaaaaataaaacctttggcataaaaaaataattaaattaaaaataaaaattccattacttcggcattttcttattttgtaatccacatcacttacaagttgagacatttcaagtaggttatatgctgcgttaaattttcactttgaatgaaggggctctcccttggaaatcgagcattctggctacatccatcccctgttcaaaatcctcttagggcatcttcctgctttaattcccacttactggtagaacggtgatatggcacatgttttatattcactattcatttgcagttttcccagagccacagatcctttatctggagatactattaattagaagaattactttattcatggaaaagcctgcacccttctcctttggaggctgagtagagtggacctttgtgccttttctggctaccccacaccagaacaccgttcttcttttggaggaatctctctcacaccctgtatcatgtaagatttggagggaggcagagccccatctctaactaaggaagctgaaggtcccgattctcccttgcacccctctggacagtccatgatgcaggctgatgacctaggcttggctgatgatcactaggcttggctagtcagcgttgcagcccagaattctaaatcttgagacagagaagcaaagtcagagagtcagtttggtaatgaccacagtagtggcagcatcagcagcccagagcagcctcagagagcctgacagacacagagccagcagcagcatcctgacaagattggagctgcaaccaaccacagttgtgttccctgaagctctccctcctttgagttccagcccattttccaagcctaggatgccatgccagccttcccactttccattgattctagaatagttctgagattctaaaataaattcctttctccttcagtgaattgtgtgtgtgtgtgtgtgtgtgagagagagagagagagagagagagagagatctaaaattcttgaccacaagaaaaaataatctcagaggaaccccatattgacaatatttccagtcaaaattttatgaaaaactagacaaaagtatgaagcaattgtactttgttatacatcttaatcttctgccaaagtgaatatcattttttgttgttgttgttcttgagacagagcctcactctgttgcccaggctggagtgcagtggtgcaatcacggttcactgcagtctcaacccactgggctcaagcaatcctcccacctcaaccttccaagtagctgggactacaggcacacaccaccacacctggctagtgtttttaggtttttgcagagaggaggtctcact

SEQ ID NO: 94431 - DNA, 19825 bp, Homo sapiens
ctgtaatcccagcagtttgggtggcagaggcaggcggctcacaaggtcaggagtttgagattagccggccaatatggtgaaaccctgtctctactaaaaatacaagccgggcgcggtggctcatgcctataatcccagcactttgggaggctgaggcaggcggatcacgaggtcaggagatcgagaccaacctggctaacatggtgaaaccccgtctctaccaaaaatacagaaaattagccaggtgtggtggcgggtgcctgtagtccccgctactcaggaggctgaggcaggagaatggcatgaacccaggaggcagagcttgcagtgagccgagatcgcgccactgcattccagcctgggcgacagagtgagactctgtctcaaaaaaaaaaaaatacaaaaattagctaggcacagtggcgggtgcctgtagtcccagctactcaggaggctgaggcaggagaatcgcttgaacctgggaggctgaggttgcagtgagccaagatcacgccactgcactccagcctggttgacagagcgaggctccatctcaaaataaataaataaattaattaattaaaataaattttaagaaaagagaaagaaagtttaataatgatttgaaaggttatatatcagatatcacttaaggccagtcacagtggctcacgcctgtaatcccagcactttgggaggccaaggcaggtggatcacctggggtcaggaactcgagaccagcctgaccaacatggtgaaaccccttctctactaaatacaaaaaattagccaggtgtggtggtgcatgcctgtaatcccagctactcaggaggctgaggcaggagaagcgcttgtacccaggaggtggaggttgcagtgaaccaagattgtgacactgcacttcagcctggatgacaggagtgaaactctctctcaaaaaaaaaaaagaaaaagaaaggtatcggccaggcgcggtggctcacgcctgtaatcccaacactttgggagaccaaggcaggtggatcacgaggtcaggagatcgagaccatcctggctaacacggtgaaacctgtatctactaaaaatacaaaaacttagccgggtgcagtggcgggcacttgtagtcccagctactccttgggaggctgaggcaggagaatggcatgaacccgagaggcagagcttgcagtgagttgagtcgagatcacgccactgcactccagcctgggtgacagagcgagactctgtccaaaaaaaaaaaaagctatcacttaaaaatagcagcaagtgaatgagtaagtcagcctcaccttcaaaatagtctaacctgaccaccattcacaaccctactgctttcatcctcttctaagccactagcatcccctggctggctgcaagtctcctcattggtctctctgcttctgctcttggcagtcttcagtatatcctcaacacagccaaagtcatcctgttaaatcaggctaccctcctactcagacctctctgaaggcttctagtcttgcccagaaggcccacaatatcctacacaatctgctcccatcttacctttgtgctgtcatgacctgctgctttcctccatacttatgcagcttctgctagccaaatctccctgcagctccctgaacgcagtgaagatactcccatctcaataccttggcagttgctattccctctgcctggtactttatggctcaatccctcaccttcttcagatccttcctcaatgtcaccttctcactgaagtcttctttaaagatctattaaagttgtaaaccaccaccacccccaatatatctatgtcgctactcaactttctttttctccatagcacttttcaaacttaacattctagtctgggtgtggtggctcatgcctgtaatcccagcactttgggaggctgaagcggggggatcatttgagcccaggagttcaagaacagctgggcaacataaggagacctggtttaaaaaaataaaaataaataaataaattaaaacttgacattctattatttatttttatagcatattgtatatttcctggtactagggtacaatctccagaaaggcagaaatgtgtacctgacttgttgctatatccccagcatctagaatatgttctggcacataataggctcgcaattaatgcttttaaaagaaataaacacacaaatttgtgattagaaaacattcatgaagcctgctgttagttctagagcagccactaaaaggatagaaaaaaagcttacaattttaaaactagtagagagaaaaaaacaatgacacaattgtgtcagtttcctagggttgccataacaaattgtcacaacctaggtggctttttaagaaattactctatttcagaggtgagaagtccaaaattaaggcatcagcaggactgtgctctgtccaaagactctgcaggaggatcttctcttgcctcatccagcttcaggtagaaagcaatccttgggttttttgtttgtttgcttttggttttgatagaaatggagtttcactgtattttttgcccaggctggtctcaaactcctgggctcaagcaatcatcccacctcagcctcccaaagtactgggattacaggtatgaggcaccatgcctggccaatccttggtatttattgatttgtggccacataactcccttctctgcctccgtcttcatacagctgccttccatctgtgtgtgtttctgcatctgtgtctcttctcttcttataaggatattagttatattggaattagggcccaccctaatccactataactgcattttaaatagttgcatctgcaaaaatctcatttccaaataaggtcacattcacaggtaccttggattaggactttaacataccactttagggaacacagttcaactcacaatagcaatcatcagtcttggtcttgaattatgtctatattcatacagaatgctcagcaatgctatgatctgaacatttatgtcctctcaaattcatatgtaggtttgttaatatcctgtttagaattgttgcatatacagtcatgagggtggttggcttataattatcttttcttgtgatactcttgtgagattttcatatcaaggttatgctggatacattgttagaggagcagcccacaagaccaccctcacttctgacaccgattgcaaggttggggtcccccaatatcctcctcctctctgacattaattgtcagcttggggggaccccaagaccacccgtgagtttaataattcacaagacaaactcacagtgctcatggaaagttacggtttattgcagctaagaatacaggttaaaatcagccaagggaaggggtacatagggcagagttcaggaaagctctaaacacagaactcccagttgtcctttccatgagttgtggacagtgttaatttcctgacatccagtgtgtgataatactcgcagaatattgtcaaccagggaagcttactcaggccagtttattaggctcaatcacataaatctggtcagctgccctcagtctcctagcccttgcaaagtttgagctgataccactgttctggtgtggggttttcatgaggttgcagtcacatggtggctggggttgggataatctttaagactctttctctaacatgtccgatccctgggtgggcagactgaaacagctacagaaagaagcatatatggcttcttgggcatctttctacttctatatgatcttttcacatggtctctccagcatagcagcttcaggatagtggacttctcacttaataaatcaggatccgaaggcacaagtcctaagaaagagaaagccaggaagaagctgtatcattttttaggatgcagtctcagaggtcacacttctgccatattcttttcatgaaaacttagtcactaagcccgcccaaatttggtggggtggggggaattaccaaagaattggcaggctatatgcagaatatgccatatcagtgaattttctatgtcagaatgatctttccaaggtgaaaaacaatactgggtcagggttggtctctggattttgaaagcaacacatataacatgtgagcctgctgctttcatctaggccaattttaagtggggcacaaagcaagaaaagcctccacggcaagtctaggctttgatgaaaattttccttccacgtggaccttatggttgagcataccatataagattgctagttggaaaaggtattttagctctccctttcccctccccctcccccctccctctcactctccttctcccgctttctgctcggtctccctctccctctgtccttctccggctttccacggtctccctctgttgccgaagctggactgtaccgccatgatctccgctcgctgcaacctccctgcctttttctcctgcctcagcctgcccagtgcctgggattgcgggcgcgcgccgccaggcctgactggtttttgtattttttggtggagatggggtttcgccctgttggacgggctggtctccagctcttgaccgtgagtgatctgcccgcctcagcctcccgaggtgctgggactgcagacggagtctcgctcactcagtgctcagtgttgcccaggctggagtgcagtggggtgatctcggctcgctacaacctccacctcccagccgcctgcctcggcctcccaaagtgccgagattgcagcctctgcccggccgccaccctgtctgagaggtgaggagcgtctctgcctggctgcccatcgtctgggatgtgaggagcccctctgcccagccgcccagtctgggaagtgaggagcctctctgcccggccgcccatcgtctgggatgtggggagcgcctctgcccggctgcgaccccgtctgggaactgaggagcctctctgcccggctgccaccctgtctgggaggtgaggagcgtctctgcccggccgccccatctgagaggtgaggagcccctctgcccggcagccgccccgtctggaaagtgagaagccccctccgcccggcagccactccgtccgggaggtggggggcagcccccgcccagccagccaccccatccgggaggtggggtcagcccccgccctgccagccgccccgtccgggaggtggggggcagcccctgcccggccagccgccccgtccgggaggtggggggtgcctccgcccagccgccgccctgtgtggaaggtgggggggcgcctctgcccggccgccccgtctaggaagtgaggagcccctctgccccgccgccaccccgtctgggaggtgtgcccaacagctcattgagagcgggccatgatgatgatgacggttttgtggaatagagagggggaaatgtggggaaaggagagagagatcagattgttactgcgtctgtgtggagggaggtggacgtgggagactccagtttgttctgtactaagaaaaattactctgccttgggatgctgttaatctataaccttacccccaaccccgtgctctctgaaacatgtgctgtgtccactcagggttaaatggattaagggcggtgcaagatgtgctttgttaaacagatgcttgaaggcagcatgctcgttaagagtcatcaccactccctaatctcaagtacccagggacacaaacactgtggaaggctgcagggtcctctgcctaggaaaaccagagacctttgttcacatgtttatctgctgaccttccctccactattgtcctatgaccctgccaaatcctcctctccgagaaacacccaagaatgataaataaatactaaaaaaaaaaattaaaaaaagaataccacagggaaaaggtattgtatggagtctctgacaagccccaataggagaaccacaccactcacctctagggttttagagtaagactgtttctgtttggtcttctgccaattattctccatttgaacagctcctgccttgctgctgggtgctggagaggctaaatgtatgactaaggagcatcaagtgactaccaaacccaaactccccatcaagcactgggtacgaactgtgagtaaaaacttcctggccaggggcagtggctcatgcctgtaatcccagcactttgggaggccaaggcgggtggatcacctgaggtcaggagttcgagaccagccatggtcaacatggtgaaaccccttctctactaaaaatacaaaaaattagccaggcgtggtggtggcgcatgcctataatcccagaatcccagctactcaggaggctgaggcaggagaatcacttgagcctgggaggcagaggttagagcaaagttccatttctaaacaaaaaaaaaacaaaaaacttccttcatgacagtcatttttgtgtctgtatgccttaccatacccaaaacaaattccaggtacccttaaaacacaatgtgaccaacagacttcctcccctcaaagaaggtgatcaaaacaagagctgcatttatatatgtatataatatatatatgcatttatatattatatatattatatatttatatttatatataatattatatgtatatataatataataatatataataatataaatatatatttacatatattatatatttatatatacatttatagaattatatgtaatatttatatataatatatatttatatatgtacatatatattgtatatatatgctatatatatatatatatatttattttttttttttttttttttttttttgtagagactggatttcgccatgtcgctggtgctggtcttgaacttcctggactcaagcaatccacctgcctcagcctcccaaagtgctaggattggccaggcgcaggggctaacacctgtaatcccagcactttgggaggccgaggctgggggataacttcaggtcaggagttcaagaccagtctggccaacatagcaaaatcctgtatctactaaaaatacaaaaactagtcaagcatggtggcaggcacctataatcccagctactcgggaggctgaggcaggaggatcgcttgaacccaggaggcagaggttgcagtgagccaagatggcaccactgcactctagcctggacaacagagtgagactccatatcaaaacaaaacaaaaaaaaaaatgattcttcctgcagcacgtatgtgctgtcgctacagagcagcgccatggcagactcagaagcactgagcttcgaacacatagggccttgatccctggctcctgcaggctgtcaacaacttgggctgctcgtgacctacggtgatccaggaaaaggctatcccattggccctagaggggaaggacctcctggctcaggctggcaggggctccaagaagacagctgcttatgctattctgatgctgcagctgttgctccacaggacggcgacaggtccagtagtagaacacgcagtgagaggccttgttcttgctcctaccaaagagctggcacagcaggcacagtccatgattcagtggctagctacctactgtgctcgggatgtccgagtggccaatgcctcagctgctgaagattcagcctttcagagagctgtgctgatggagaagccagatgtggtagtggggaccccatctcrcatattaagccacttgcagcaagacagcttgaaactccgtgactccctggagcttctggtggtggacaaggctgatcttttttccttggctttgaggaagaactcaagagtctcctctgtcacttgccccggatttaccaggcttttctcatgtcagctattgttttttagttccttcttcttcctcttcctcttcctcttttcttcttcttcttctttttttttttattattttttttttattgatcattcttgggtgtttctcagagagggggatttggcagggtcataggacaatagtggagggaaggtcagcaggtaaacaagtgaacaaaggtctctggctttcctaggcagaggaccctgcagccttccacagtgtttgtgtccctgggtacttgagattagggagtggtgatgactcttaatgagcatgccgccttcaagcatctgtttracaaagcacatcttgcaccgcccttaatccatttaaccctgagtggacacagcacatgtttcagagagcacagggttgggggtaaggtcatagatcaacagcatcccaaggcagaagaatttttcttagtacagaacaaaatkaagtctcccatgtctactcctttctacacagacacagcaacaatctgatttctctatcttttccccacctttcccccttttctattccacaaaactgccatcgtcatcatggcccgttctcaatgagctgttgggtacacctcccagacggggtggtggccaggcagaggggctcctcacttcccagaaggggcggccgggcrgaggcaccccccacctccctcccagagggggcggctggccgggcgggggctgaccccccacctccctcccggatggggaggctggccgggcgggggctgacccccacctccctcccggccggggaggctggccaggcgggtgctgccccccacctccctcccggatcgggcggctggccggcagggggctaacatttaagtctttaatccatcttaaattaatttttgtacaaggtgtyaggaagggatccagtttcagctttctacatatggttagccatatgtagaaatggccatctacaattggccagcaccatttattaaacagggaatcctttccccatttgttatttttgtcaggtttgtcaaagatcagatggttgtagatgtgtgatgttatttctgagggctctgttctgttccattggtctatatctctgttttgatacaagtaccatgctgttttggttactgtagccttgtagtatagtttgaagtcaggtagtgtgatacctccagctttgttctttttgtttaggattgtcttggcaatgcgggcttttttttggttccatatgaactttaaagtagtttttctaattctgtgaagaaagcctttggtagcttgatggggatggcactgaatctataaataaccttgggcagtatggccatgttcacgatattgattcttcctatccatgagcatggaatgttcttccatttgtttgtgtcctcttttatttcattgagcagtggtttgtagttctccttgaagaggtccttcacatcccttgtaagttggactcctaggtattttattctctttgtagcaattgtgaatggcgttcactcatgatttggctctctgtctttgtctgttattggtgtataggaatgcttgtgatttttgcacattgatgttgtatcctgagactttgctgaagttgcttatcagcttaaggagattttgggctgagatgatggggttttctaaatatacaatcatgtcatctgtaaacagggacaatttgacttcctcttttcctaattgaatgccctttatttctttctcctgcctgattgccctgcccagaacttccaacactgtgttgaataggagtggtgagagagggcatccctgtcttgtgccagttttcaaagggaatgcttccagtttttgcccattcagtatgatattggctgtgggtttgtcataagtagctcttactattttgagatatgtcccatcaatacctagttgattgagagtttttagcatgaaggctgttgaattttgtcaaaggccttttctgcatctattgagataatcatgtggtttttgtctttggttctgtttttgtgatggatttcgtttattgattcatgcatgttgaaccagccttgcatcccagggataatgccaacttaatcttgatggataaggtttttgatgtgctgctggattgggtttgccagtattttagtgaggatttttgcatcaatgttcatcagggatattggtctaaaattctgtttttttgttgtgtctctgtcaggctttggtatcaggatgatgctggcctcataaaatgagttagggaggattccctgcttttcatttattggaatagtttcagaaggaatggtaccagctcctctttgtacctctggtagaattcagctgtgaatttgcctggtcctggactttttttggttggtaggctattaattattgtctcagtttcagagcctgttattggtctattcagagattcaacttcttcctggtttagtcttgggagggtgtatgtgtccaggaatgtatccatttcttctagattttctagtttatttgcatagaggtgtttatagtattctctgatggtagtttgtatttctgtgggatcagtggtgatatcgcctttatcatgttttattgcatctatttggttcttctctcttttcttctttattagtcttgctagtggtctatcaattttgttgatcttttmaaaaaaccagctcctggattcattgatgttttcaagggtttttggtgtctccatctacttcagttctgctctgagcttagttatttcttgccttctgctagcttttgaatttgtttgctcttgcttctctagttcttttaattgtgatgttagggtgtcaaytttagatctttcctgctttcttttgtgggcatttagtgctatacatttccctccacacactgcctttaaatgtgtcccagagattctggtatgttgtgtctttgttctcattggtttcaaagaacatctttatttctgccttcgttgtgtacccagtagtctttcaggagcaggttattcagtttccatgtagttgtgcagttttcagtgagtttcttagtcctgagttctaatttgattgcactgtggtctgagagacagtttgttatgatttctgttcttttacatttgctgaggagtgctttacttccaactatgtggtcaattttggaataagtgcaatgtggaactgagaagaatgtatattctgttgatttgaggtggagagttctgtagatgtctattaagtcagcttggtgcagagctgacttcaagtcccagatatccttgttaaccttctgtctcgttgatctgtctaatattgacagtggggtgttaaagtctcccattattattgtgtgggagtctaagtctctttgtaggtctctgaggacttgctctgtgaatttgggtgctcctgtattgggtgcatgtatatttaggatagttagctcttcttgttgaattgatccctttacctttatgtaatggccttctttgtctcttttgatctttgttggtttaaagtctgttttatcagagactaggatagcaacccctgcttttttttgcttggtagatcttcctccatccctttattttgagcctatgtgcatctctgcatgtgagatgggtctcctgaatacagcacactgatgggtcttgactctttatccaatttgccagtctgtgtcttttaattggagcatttagcccatttaaatttaaggktaatattgttaatatttacatttaagtttaattatgtgtgaatttgatcctgtcattatgatgttagttggttattttgcttgttagttgatgcagtttcttcctagcatcgctggtctttacaatttggcatgtttttgcagtgcctggtaccggttgttcctgtccatgtttagtgcttccttcaggaactcttgtaaggcaggcctggtggtgacaaaatctctcagcatttgcttgtctgtaaaggattttatttctccttcacttatgaagcttagtttggctggatatgaaattctgggttgaaaattcttttctttaagaatgttgaatattggcccccactctcttctggcttatagagtttcttctgagagatatgctgttagtctgatgagcttccctttgtgggtaacctgacctctctctctggctgcccttaatattttttccttcatttcaactttggtgaatttgacaattatgtgtcagattcaccaagatactactcttctcgaggagtatctttgtggtgttctctatgtttcctgaatttgaatgttggcctgccttgctaggttggggaagttctcctggataatatcctgaagcatgttttccaacttggttccattctccccatcactttcagatacaccaatcaaacgtagatttggtcttttcacatagtcccatatttctcggaggtgttgttcatttctttttactcttttttctctaaacttctcttctcagttcatttcattaatttgatcttcaatcactgataccctttcttctgcttgattgaattggctactgaagcttgtactgaaacttgtacatgcgtcacatagttctcgtgccatggttttcagctccatcgggtgatttaaggtcttctctacactgttgattctagtttgccattcgcctaatcctttttcaaggtttttagcttccttgcgatatgtttgaacatcctcctttagctcagagaagtttgttattatgaccttctgaagcctacttctgtcaacttgtcaaaatcattctacatccagctttgttccattgctggcgaggaactgcaatcctttggaggagaacaggctgtctggtttttagaattttcagcttttctgctctgatttctccccatctttgtggttttatctacctttggtctttgatgatggtgaagtacagatagggttttggcatggatgtcytttttgttgatgttgatgctattcctttctgtttgttagttttcctcctaacagtcaagtccctcagctgcaggtctgttggagtttgctggaggtccactctagacctgtttgcctgggtatcgccagcagaggctgcagaatagcaaatatcgcagaacagcaaacattgctgcctgatccttcctctggaagcttcgtctcagaggggcacccagctgtatgaggtgtcagttggcccctactgggagatgtctcccagttagactacataggggtcagggacccacttgagggggcagtytgtccattctcagagctcaaacactgtgctgggagaaccactgctctcttcagagctgtcagacagggatgtttaagtctgcagaagtttctgctgccttttgttcagttatgccctgcccctagaggtggagtctacagaggcaggcaggcctccttgagctgcggtgggctccacccagttcaagcttccaggccactttgtttacctactcaagcctcagcaatggcagacgtcccctcccccagccaggctgccacctcgcagctcaatcttgtactgctgtgctagcagtgagcaaggctctgtgggcgtgagacccactgagccaggtgcaggatataatctcctggtgtgccatttgctaagaccattggaaaagcacagtatttgggtgacagtgtcctgattttccagctacagtctgtcacagcttcccttggctaggaaagggaaatcccccaaccccttgtgctttccaggtgaggtgatgccccaccctgcttcagctcaccctccgtgggctgcacccactgtccaaccagtcccaatgtgatgaaccaggtacctcagttggaaatgcagaaatcatccgtcttctgcattgatcacgttgggaactgcagaccagagctgttcctatttggccatcttggaacccttcccaatatttagtattttaaatatttagtttcttgttagctggtcttcagttgacttggttctctatccagttacagccatggtgcatgttgcatgcagtcgtctatacattatttaaaygggcttaaatattaaatgtgttacccaccaataataaaatagacccttatgaaaactataaaaacaaaacacacaaaaaaagccattgggtacatttgttcaaatctttttttttttcgagatggaatttcactatttgttgccctggctggagtgcagtggcacaatctcagctcactgcaacctccgcctctcaggttcaagcaattctcctgtctcagcctccccagtagctggaattacaggcacctgccatcacacccagctaatttttaatatttttagtagagatggggtttcaccagttggccaggctggtctcgaactcctgacctcaggtgatccgctccccttggcctcccaaagtactgggattacaggcgtgagccaccatgcctggccttaaatctctttttttaaatgctcttgggcttggcacggtggctcagccctgtaatcccagcactttgggaggctgaggcaggcaaatcacgaggtcaggagatcaagaccatcctggctaacacagtgaaaccctgtctctaccaaaaatacaaaaaattagccgggcatggtcgtgggtgcctgtagtcccagctacttgggaggctgaggcaggggaatggcatgaacctgggaggcagaggttgcagtgagccaagatcttgccactgtactccagcctgagcgacagagcaagactccatctcaaaaaaaaaaaaaaaaagttctttattgccttcagctgtcagggcttcatgacttccattctatagaatttaaacaaaatcctctgtttctcaatggcagcacagctggcatttgagatcagaccattctttgtcatggagcagggatgtcctgtgcagtgtaaggtgtttcacagcatctccagcctctattcactagatgtcagtagcgctcctgccaggccttccaccaccactcattgcggtgtctccagacattgccaaatgttccctagatgtagggttgccaggtaaaatattgcatgggacaaacatactaaaaatattatcgattgtttatctgaaatgcaaatttaagttggccttccatatctttatttgctaaatctggcaaccctatctgagaggtgaaaaaccctatctgagaggtaaaatcaccactacatctcctacctcccatcccatttgaaaaccaatgctctagtccacagggagcaatggagaaaaagtgtggtaatgggtttgggaaatgttatgattagatttgcatttggagcaaagcactttttgtttgtttgttttgtgttgtgttgttttgtttgagacgcagtctcactctgttgcccaggctggagtgcagtggcatgatctcagctcactgcaacctccgcctctggggttcaagtgattctcctacctcagcctcccgagtagctgggatgacaggcacccaccaccacacccagctaatttttgtatttttagtacagacggggtttcaccatgttggccaggatgttctcgatctcttgacctcgtgatccacccgcctcgacctcccaaagtgctgggattacaggcatgagccaccgcacccagcctggagcaaaaaaactataagacgtccaagccctcttcaccagccaggactgctgtagtcaacatcctgtttgagacctgattggaatgcctggctctctttttttttttttttttttttgagatgtagtctcgctctgtcacccaggctggagtgcagtggtgcaatcttggctcactgcaacccccacctactgggttcaagcgattctcctgcctcagcctcctgagtacctgggactacaggtgcacaccaccacacctggctaatttttgtatttgtagtagagatggagtttcaccatattggctagtctggtctcaaactcctgaccttgtgattcgcctgcctcggcctcccaaagtgctgggattacaggtgtgagccaccacacctggccatctctcctttttagtaagcaactagagttgggattccagatgtggccaggcacatgcacctctggagagactaccctgtctgctaaagctggaagaataaaagaaatgggtgattgtgctatctcctgtttctcttctttaatatgtttatattgaaggcttaatttaattagctaataaaggtgcattaggaagaactaacatgaaatattttctcttgtccttaaatccagttcagggatctcctaaaaacaggaacatacttgtgttctgggacagatgagacttgaaattccaaacccagaatgtctttgtctttatttttcttttcttttctttttttttttttttttttgggtaaagttttgctctgtcacccagggtggagtgcaatggcgagatcttggctcactgcaacctctgcctccctggctcaagccaaccttccacctcagcctcctgaggagctgggactacaggcacgcattacttcctagctaatttttgtacttcttgtaaagatgaagttttgccatgttgcccaagctggtctcaaactcctgacctcaggcaatccacctgcctcggcctcccaaagtgctgggattacaggcatgagccaccatccctggcccagaatgtctttttatttttcaatttttttatatctttttgctaatcttctctgtattgttccaattttagtatatgtgttgctgaagtgaacatttatttttattcaatgggttcttcctagccactgtgcaagcccagaatatgtgaggtggaattcaccagaaccataggtattcttttaaaatatccctcaacacatcagccaatttataaaaagaattcaaagaaacatagagttgcaaattgatgtgatttagtctcctctcctccttgttagaattccagtttttccgtctccaaatagccggggttggaagatgggttctcgccctgacaccgcagagctctgtctcatctatagaacaagagtacagccgcctccgttatctcccgactgcagctgctcttaacgtgagttccatatccatcccagtcaaaggcggagaagtccccacactgacggggtttgccctgtgggaagaaccctcctccaccgatgcagtgctgggaaacagaaagaagaaacactgtgaggaatttgatttgctgctgacaccagtgagcgcaaggctggtctcgaactccagacctcaagttatccgcctgcctcggcctcccaaagtgctaggattacaggtgtgagctaccacacctggccctmtgcatgtattttaaagtagtaatgcatgcaggaacatacacaaacacgcactaatggacagtctgaggagcacagagccagtagagaaacttgtcaaggaaaagggcataaagacatatactctagtccacccccactgcccacgtggtcgtcatcctccgaattctaatctgcgagtccctccatgagagaatagctgcctcatcttagctggaaaatgaaaaagctgaaagctggggcagggaagatggaaccgtgagttcagactgtcagttggggagggaagggggccctaagtgaatgcccttgttcttgatggctctgacgctctcttcctccaacccctaggcacaggatgtccctcaaatacaatctcccaccactacaactgtggtgctgtctcctacaagactggaaaaacaataaaaatataaagcttctaaaagttaagattaatattggagaatattttcacgacctcggtgtaaggaggtacatcttaaagaaaacattaaaagtactaaccataaatgaaaagtttgataaactgaattccattaaaataaattatactcagccgggcacggtgactcatgcctgtaatcccagcactttgggatgccaaagtgggcagattgcctgaggtcaggagtttgagaacatggagaaacccatctctactaaacccatctctactaaaaatacaaaaaaattagccgggtgtggcagtgcattcctgtaatcccagctactcaggaggctgaggcaggagaaacacttgaacccgggaggcagaggttgcagtgagcagagatcctgccattgcactctagcccaggcaacaagagtgaaactccctctcaaaaaataaataaataaatacataagatttaaaagacaaataaattatactcaacttctggcatctactactccaaactttgtaccacttaatttttattaaaaatatggactcttcaggctgggcgtggtggctcacgccagtaatcccagcactttgggaggccgagacgggcggatcacgaggtcaggagatcaagaccatcctggctaacatagtgaaaccccgtctctactaaaaatacaaaaaaaattagtggggcgtggtggtgggcccctgtagtcccagcaactcgggaggctgaggcaggagaatggcatgaacccgggaggtggagcttgcagtaagctgagatcgcgccactgcactccagccttggtgacagagcgagactctgtctcaaagaaaaaaaaaaagaaagaaaaggactcttcaaagaaaaaaaaagaaataaaaaataaattatattcataagacatcatcaggagagtaatgagagtaaacagaatgagagtaagcgagtaaccacagagacacacattgatacaccccacacaggtacacacatgtgcatacccatgcacacacatggtgaagggggccagcccctccacatctgtgggtatttctcgtcaggtgggatgagagactgagaaaagaaataagacacagagacaaagtatagagaaagaacagtgggaccaggggaccagcactcagtatacggaggacctgctccggtgccagcctctgagttccctcagtatttattgatcattatttttactatcttagtgaggggagtgtagcagggcaacaggtaaggagaaggtcagcagggaaacatgtgagcaaaggaatctgtatcatgaataagttcaaggaaaggtactgtgcccggatgtgcacataggctagatttatgtttctctttacccaaacatctcagtgtagcaaagagtatcagagcagtattgctgccagcatatctcgcctccagccacagggcggttttctcctatctcagaatagaatgaatgggagtggtcagctttacacccagacattccattcccagggatgagcaggagacagaagccttcctcttacctcaactgcaaagaagccttcctctttcactactcctcctcagcacagaccctttacgggtgtcaggctgggggatggtaaggtctttcctytcccatgaggccatatctcaggctgtctcagtgggggaaaaccttggacaatacccaggctttcttgggcagaggtccctgcggctttccgcagtgcattgtgtccctggtttatcaagaatggagaatggcgatgacttttaccaagcatactgcctgcaaacatattgttaacaaggcacatcctgcacagccctaaatccattaaactttgattcattacagcacatgtttctgtgagcacagagttggggctaaagttacaggttaacagcatctcaaagcagaaacaatttttcttagtacagattaaaatggagtttcttatgtcttccttttctacatagacacagtaacaatctgatctctctttcttttccccacacgtgggccattgatctccccaaaaactcacatgctcagtgttacagccagtaacttttatcccagcacaaagggcgttggctgctctctcgttattaaacacccggaactgaacgaatcctgcaacaaattcccctgaaaaagaagaggtgaagaaacagccaagtagtcaaaggatgaactagaagcagcatcccattggccagtccagggattccctaagccaaaagctgaggctacagccaaacaccccaggctgtaggggtgy

SEQ ID NO: 94432 - DNA, 61193 bp, Homo sapiens
ctctatggttcaactgtcctcaccttcctcttggccactgtggcccagtgccatccccaagacttacccacacaaggaaggtcattccagagagactatgtgtgtgggctggccccagggaggggcaactgtagacctttttgttctacaggagggggaggtggcaaccaaacaaagttccattgtctgaccaacgctggggggctcatgccacccctactcccaccccaactgtcctgaatctctcacctcagcatgcaataccatgtacttaccttctggaacttccaccttagaaccttcttgggaatcccccttgtttaacaagggagataattcactggctctaacttctattcctcctgttacaatatcaaccattgcccttctcagctgtgctcaatggttctatgagtggaacaagtgttgagacacaactctccctcttccttatacatcaagattccttccccctatttccctcactatgcccttctccaactctctatctttaacattttctcagggtacccccaaatagcccagtacaacccagaagagtctagggctcaagcagctgacagcagagaaccctgggcattctggccagccccctttcccttgatgtcctccccaccacccccacttgcctatggctcactcattgcactaggattcagggcagttcagagaagggaaggggccattccaataatcctgctttgacctcttactcacccaacatctgccagggggcaaggaaagggctggtcagcttatgaaggaagacagctttagagggataagatcccagaatctcatagaacctcactccattcacccacacaacaggtgaggagccatagagagacaaaaaatctgaggagctgagaccacaaacctgggctccttacttagatcgcactctctttttccttctgggaaactaaggttaaggcacctcctgcactgctaggggacgagtgggaaccaaacccaggtgtttgagcctatttctttatgtaatctaacactgcttcccaccaggctgttagcatggctctgggggcatgctactatttccaacctgggtccagccatggccaccactcagggaagcttgctacactctcttttaccctttcttttaaaataaaacctctacttcctccctctaaatgcatatttttttcttttcatatatatatatatatattttttttttttttgaattttacagatggagtctggttatgttgtccaggctggtctccaactcctggggctcaaataattatcccaccttggcctcccaaagtgctgggattacaggcatgagccaccatgcccagccgcatattttttctttctgaatataatgtcaccttcctgctcctgcttgttctttctttggttgcagtggggagtgcagcaaaggctgtggggattgctgagagacacctgagtcccaagactcccagagtagagtggctccacttacccaaagaagagaagagcagcacagccaggatagggctggggctggatgagggagccccaggagccatagctggggcaggggcaggggcccggagcatctgtggggttgagaaagtgggggaccaggaactgaacggggggttcctggaacctgcttaaaatcccctagggccccagcatgagggggctgtcctcagccagtaaccaattgcagcctggcatgtgcagttgagaggtggtggggaggggggcagagtgcagggagcagaaggggcattgtatagtctgggtggaggggtggggggacacataccaccccatacacagagggctttgtgtccactggcctccccctgccccaggctggaatgttgtggggggtggtgagggagagggacaaaaacagggacacagacacacttctctgagggatagatatggaacctcaatttaaaggccataaaaagggatttctcctcagcctccttgcctgagagaggctgcctcacagccctaggaactagagggaggtttcccccagagaactctgaaaataggatatcccctgttatctcctctaatgtgggctgcattacagacttcttgagatgaccaagtcctatgggagtttttttccccgcacctcccttcatcctgtgcgattcttcccagacagaagtttttctccactggactatttccaggcaagaagcccctgacctttccgtttgtcaagaagtccttcagtgcttcatgctgctgtttaagtccatttcaatttatttcaaggctacaaaattgtattaagtgccagcaatatgtaaagtatgagaatgcaggtaatagagagaggaataaaaattaagtccttccagcaaggagttgaaaatttggtttggggaggtggagatgggaagatcagaggacaaacccatcaacaatcaagtataataagccatgacacttcctttagtaatgaacaaaatgctgggagtacaaaagaggggcacacacagctgcaatatcaggaagactaagttatatgagagattaaagacaaaataaactttaataaatgaagtttatgccaggcatagtggctgacacctgtaatctcagcactttggtaggcttatgcaggaggattgcttgagtttaggagtttgagacctgtctgggcaacatagcaagacctcgcctctaccaaaattttttaaaaaatcagctgggcatgttatcacatgcttgtagtcccagctacttgggaggctgaggcaggaagatcgcttgaacctgggaaatcaaggctgcagcgagctatgattgtgccactgctttccaccctgggctacagaatgaaactctgtctcaaaaataaataaataaataaataatcaaacaaataaatagttcagagggaagaatagttgtgtctaggaggcaatgttagatatgaatcagccttgaaggatgactgtcattttggaaagggagatagggagggttaccagaagatagaacagcaaaagcaaggacaaagaggtgagacggagagacagaatgtgtgtgtgtgtgtgtgtgtgtgtgtgtgtgtgtgtgtgtgtgtgtgtgtatgtatatgagatgtaggtttctgaagtgttggatatattcagggccgatcttgtgccatccactttgacttgatttggggaaacttgaagtggcatagtcagaaatgagactggacaggaaagtcgaaaccagtttgtgaaaggccttaaatgacaggtgaaagaaggtgaattcaatttggtacatcatgagaacctgaaggtgttggggtggagttagccatggggatgtctacataaccagagctgaggtttttttgtttgttgaggcagtctcgctctgttgcccaggctggaatgcagtggcatgatcatggctcactgcagccttgacctctgaggctcaagcaattgtcctacctcagctttccaagtagctgggaactacaggcgcatgccagcatgctgggctagtttaaaatttttttttttttttttcagagataaggtcttgctctgtggcccaggctgtagtgcagtggtgcaatgatagctcactgcagcctcaacctcccaggctcaagcgatcctcccacttcagcctccagattagctgagccacaggcagccaccaccatacccagctaatttttcaattttttgtagagatgaggatctcactgtgttgctcaggttgatcttgaactcctatactcaagtgatccttctgccttggcttccctaagtactgggattacaggtgtgagtcaccgtgcctgacctctagaagttaatgtaagtggggtggtcattgttattcctgctatgagaccactgcaggctcacccaggtgaaggacagtgtcctggtaccttcctggcatctcattagaccacagccctggtgggtatggtcattagtattagatttgggttgtggaattctaaatatgggattgcttatgaagtccataggcaaaaccatcatcattgacaaatgtttacaggatgttgtagtcaacatttctataaaacagcaattcaaagtacaaaaaaaaaaaaacccccaaaactctcccctccaaaatttccacctaactccacctcccaactgtaagcaatcatttcctctttatctaaccaccccttttatcaacaccctcttcaatgggttgttgctactttctttgttgcatgtctttattgatcctgctaaggctataaccttcttggggacagtacaaacatctgtatctttgaatcccctacagaacttttcacggactgacaaaaagtccataactacatgctaaatgaaattattaatatttaaagagctgagtgggctgggagtggtagctcgcacctataatcccaggactttgggaggccgaggccggtggatcacttgaggtcaggagttctagaccagcctagccaacatggtgaaattccatctctactaaaaatacagaaaattagccgggcatggtggtgcaggcctgtaatcccagctacttggggggaggctgaggcaggagaatcgcttgaacctgggaggcagaggctgcagtgagctgagatagcgccactgcactccaacctgggcgacagagtgagactacgtctcaaaataaaagaaaaagaaaaagaaaaagaaaaaccaaaaaagatctgagtgaaaaaggcattccttgggtttgttaacgtgaagctccagagagccaagtcaatgactggaatttcgatagcacaaaactgtatttaaatataataactaacgaataagttgttcattaaataaaacttgttgtttgaggtacccatcattgaatatgggggggtagagtcttgaagatcagctgttatgggtgttgcagaggagatccctgcatagatagtagattggattagagagcctctttcaatcctaaagtgtacgaatgtgctttgtcaagcattatagaaatgcaaagtagtattattcatctgatgcagaaataagtgaatttgtgctatttaaatcctgaagtgcagggatgctaaatatacataagatctgaatattaatataattgagtattttttttgtagaaataggagttgctctagcctgtcccttttactcctctccaccctactccccacaagagtcaagaacttttgtgctctgttcccttcctttatcatttgctcttcttctttcttcagtcttgagtgctcggcagttgattcctgtgcttgggttccctaaaactgtatatatatatatacacatatataaatcaaagcgtgttcttcccctcactccgggttcttctagctgtgggtgtcacccacatagcgctgaaacaacgaacaagggagcattgtcctcggctagtgggcgcctggtccatgtggcagctcaaacccaggaattgtggggtctaatcgaggtggttagatgaggctcctcgttttcgggaatggtggtccgcaaggtcttctcgaggcccctctacacactccccaacttaggtcacaatttatgtatctgtctggttaaagcttcgtattagaaagggagggaacccaaagtatcttttctcttcggggtctcaaccggccaaccaccacgtttttaggccgacctgggaggcagggggaacgcaacagactgcgaagtccttaaggaagaatctaaacaagtccgccgtttgctgtttgggagtgcgatacaaaatgaatatgtacgcaggtggaacgtagactgcagattttgagccagcggcgtttctgccgaaatcctggcaaattccggtagaagtcggctgcaggaggcggaggaggagactaaaaaaccagaaaacaaccagcaaaccagctaggcagagctgagcggagaagctccagagccttttaaagagactctcgtcacatgacacccccaaccccgacccccagccggcgcgcctccgccctcgggtggcggggccgcctggcgtcacttccgtccagaccggaacccaagatggctgcgctgttgctgaggtgacttcagtgggactgggagttggtgcctgcggccctccggagatctgaactggcccctcacgttttgctgataactgtytatcctgtgcctgggcagggaaaggacccatgggtgtggaggccaagcgctcggggatcctagagaccccttttcccgtcccccccagccgctccggtgcgctccgtagggcttcggggtcactgacttcgtatcgaggggccctcggctctcgccccttctgttttccccacctcctctagtacttctaacgcaaattgctctcgggcctgcacccagagccgagctctgagaaaataacttcaaggtcagccacccatgggtcctacgatttcgagagcgtatttagacatttagcttcggagagagagatcttcgtgtattttgcctttgcttcgaatgccttcagacactagctgctcccaccgtgagtgggcgctgtctgggttcccagcgggctgctggcaaagggtggatccctactggggtggcgattagcattagcacccagggcggacctctgctgccccagagcaacccggggaattcatttttagttaatcattttacttgggagggagagtgagtgtcccagtttttctctaaaatgtgaattagttgtccagagaaataccctagattttctttcattctgaactttccgctgtctaggtctcattctctgctcagcctctctagtcacagcgactagcgcctttagacacgcctggtacaaatcccagcatagttttgtgccagccttatttttggaaattgtttgttatggaaagttagcttcaatgctgttgagatttcaatccctgatttccccaaatgtgttctcatttctctttccacttcagtcacccagtttaaaaatagagggactttgtttagtttttctgtgacaaaatgattcctcttggagttgaaatcagggttatcttaatccttcattttctccctgtttttcatctccatatgtatcttctgtctaaggtatgccaaggcttgtcttgccagtgctgtcttctttattccagatggtttgaccataattgaatgcttttgaattctctgatatattttggtatcgatgttaggggcttttggtaaaattaacatttagtttgaagtgatcatattggttccaaacagttcattttaggagttttggaattagtgtttaaaagctgaggatcattatagtcattaagtgtatccatacagtatcattttgagttgtgcagcgctgtccactgaagggatgggtcgcccctccacacctgtgggtgtttctcgttaggtggaacgagagacttggaaaagaaagagacacagacaaagtatagagaaagaaaaaagggggcccagggaaccggcgttcagcatacagaggatccccgccggcctctgagttcccttagtatttattgatcattattgggtgtttctcggagagggggatgtggcagggtcataggataatagtggagagaaggacaaaggtctctgcatcataaggtaaagaattaagtggtgtgctttagatacgtatacacataaacatctcaatgccttgaagagcagtattgctgcccacatgtcccatctccagccctaaggcggttttcccctatctcagtagatggaatatacaatcgggttttacaccgagacattccattgcccagggatgatcaggagacagatgccttcctcttgtctcaactgcaaagaggcgttccttcctcttttgctaatcctcttcagcacagaccctttacgggggtctgggggacggtcaggtctttcccttcccacgaggccatatttcagactatcacatggggagaaaccttggacaatacctggctttcctaggcggaggtccttgcggcctaccgcagtgttttgtgtccctgggtacttgagattagggagtggtgacgactcttaatgagcatgctgccttcaagcatttgtttaacaaagcacatcttgcacagcccttaatccatttaaccctgagttgacacagcacatgtctaagggagcacagggttggaggtagggttacagattaaaatggagtctcttatgtctrctttctatacggacaccttaacaatctgatctctctttcttttccccatagtccacactaggattcaatgccaagaaaggtatatttttcattagtggtaatctgaagctctcgtggaaaggacacctccatttctcataagggatttttttaggaggataaatgaggaattaaaaattttttttttcttgatagaagttcccagtctaattccatttcactagagggatttggaactgtttataatgtgctgatttaacctcaaaggaaaataccttctgagaaatcctaggagctgatttctggttctacatttattttggacaagtcaaggtcattgattccatgattttggtttcctcatttgtgttgcaaacggcaataacttgggcccacttaagagaaatattggttaaacttttctttttgttctttttttgggggtctctttttttttggttctttttcttttttttttttttgagacggagtctcggtctgtcacccaggctggagtgcagtggcacgatcttggctcactgcaaccgcccctgcccgggttcaagcatttctcctgcctcagccttctgagtagatgggattacagcaggggtctgccaccacgccaccacgcctggctaatttttgtatttttagtagagacggggtttcaccatcttggccaggctggtcttaaattcctgacctcatgatccatccgcctcggcctcccaaagtgctgagattacaggcatgagccacaacgctyggcctttatttttatttttggttaaacttaaaaaatttttttatttacttattttaattggcaaataaaaattgtatatatggtgtacaacacgatgttttgaaatatgtgtaccttgtggagctattgacatatgcattacatctttgtgggggaacacttgaaatctattcttagtgattttcaagtatgcaatgccttggttttgtgtgtgtgtgtgtgtgtggtttttttttttttttttttttttttttttgagacagagtctcaccctgtcgcccaggctggagtgcagtggcgcaatctcagctcactgtaacctctgcctccygggttcaagcgattctcctggctcagcctcccaagcagctaggactacaggcgtgtgccaccatgccaggctaattttgtatttttagtagagacggggtttcaccatgttgatcaggctggtcttgaactcctgacctcaggtgatccacctgagccaggcatcagccaccgagccaggcataagccaccacgccgggccaatgtaacaacataataacataataataacaattgtggctgggcatggtggctcatgcctgtaatcccagcactttgggaggctgaggctgtcagatcacaaggtcaggagatcaagaccatcctggccaacatgatgaaaccccatctctactaaaaatacaaaaattagccgggtgtgatggtgcgcgcctgtcgtcccagctactcgggaggctaaggcaggagaatcgtttgaacctgggaggcggaggttgcagtgagctgagatcatgccactgcactgcagcctgggcaacagagcaagactccatctcaaaaaaaaaaaaattgtactgtgttatacaatagatctcttgaacttattcctcccttctaactgacattttgtatcctttgaccaacttcttccccttccccctcccccgcatataaacatgtttatgcttggctaattaagaattattagttatcagagtattgtattgtcatggcttttgaatatatgctctctattttgtatgttctctaaacagttcagggaccagctagagatgaacaaccagctaagtaacacaaaccattggcactcagtcaaggaatgacttgccaaggccaaggagttagagaactaagctaaggacagctaggcttctatgtaataatgttcatgctccttaaacacaaagtcaccaagagtcattaactatctggccagtactcattgtattaaatgccgtatgtgaaatgcccctaaatattaaggtttaactctcaatttatgaaactgctttttaaaataagcatattcattcacaaacctttttattttgttatttttattttttttaacctttttctttgtgtcagacattattataggtactgtggatccaaggccaggtgcagtggctcatgcctgtaatgccagcactttgggaggccgaggygggwggatcacctgrggtcaggagttcaagaccagcctgaccaacatggagaaacctcgtctctactaaaaatacaaaaatttgctgggcgtggttgtgggtgcctgtgggtgctggtaatcccagctacttgggaggccgaggcaggagaatcacttgaacctgggaggcggaggttgcagtgagccaagattgtgctgttgcactccagcctgggtgacaagagcaaaactccatttcaaaaacaaacaaaaaacagaaacaaaattagctaggtttggaggcacatgcctgtaatcccagctactcagaaggctgaggcaggagaatcgcttgaactcgggaagtggaggttgctgtgagctgagatcgtgccattgcactccagcctgggcaataggagcgaaactctgtcttaaaataaataaataaataaataaataaataawgtactgtggtactatggatccaaaatattttgatagtttgagctcaaagtctagcagggagataaatagattaattattaaaccacataagaaatattgatagatatgaacaagtgtgagagcaaggcagatatagcaagtaaggctaaagaagtgatcttgctatccaggaattggttgtttttttttttttggttttggttttttttttgagactgagtctcgctctgtcgcccagggtggagtgcagtggtgtgatcttggctcactgcaacctctgcctcctgggttcaagtgattctcctacctcagccacccgggtagctggcattacaggggtgtgccagtatgcctggctaatttttgtatttttactagaggtggggtttcaccatgtcggccaggcttgtctcaacctcctgacctcaagtgacccacccaccttggcctcccatagtgctgggattacaggcatgagctaccacgccrgcccttaggaattgagttttgaaggatgagtttaacaggctctgagggaggctctattcagagaacagcatgagcaaaggcatgtggtcaaaagatggtttgctgtagctggacataatgtaatgttcagtgtggcagaattacagtggattgaaaggaatttgtgggaggttaggtccagagagttggccacgttgtgaagtgcgttgtttgcccacagtttggatcttatactgtaagcagcgggaaattgttaaagacttttaggcaggagaatgatgaaaccatgttattttatttatttttcagtaaattagtgttggtgttattgaatgatatgtaagagattggtgcgagggagatcagttcaggagctcttgttacagtcctagtgagaaacgaagaggatatagactatagcaatggattggaatgaattttcctagctgttaatgataggattgggtgatgccatcatatggggggggtggtgaaagaaaagaaatcaaggatgacttaggttatagtttggtagttgggtggtaataatcattaaccagaacttttgtatacaaattattattcatcatgccattcaaagttatatatctattttattgttgctgttacctagacatttatgaaactttttggtataccatcagatcaagtttagaaactcattatattacagtcatataatgtatgactataataagataaattatagtcacatcttgttttggactaaaaatggtattcagtttgatcacatagacttggctttgaataactttttttttccagaaatcaaatttattttcagtggatgagtatttttgtcaccactgagggttttaaaaagaatgtgatgcaaattctaaagacctcggggagaccagtgataatatgttacatatatatgtggtgtattgtagtttagacaatgctttcctgtatgttttcttgtgcagtcccctcagcaaccaataaggtaggtattatcaatcccattttataactgaaaacgctgaagctcaatgactcactcaagttatacaacttattctaagacttcagtcttgatttttttttttttttttgagatggagtcccgctctgtcaccaggctggagtgcagtggcccaatcccrgctcactgcaacctctgcctcgcgggttcaagcgattctcctgcctcagcctcccgagtagctgggatcacaggcgtgcgccactacgcccagctaatttttgtacttttaatagagacggggtttcatcatgttggccaggatggtcttgatctcctgaccttgtgatctgcccgcctcggcctcccaaagtgctgggattacaggcgtgagccaycgcgcccggcccagtcttgattttttacttcccaatgttatttttacattaccattgctgccccaatccagagaagagtttcaaaaatgatttcagcaatgattacattttggggagacatgttaatgcatttagaaggggcaacaataactagaaattgtaagttctggcttgtcaattaaaaatacagagttcctgttttcacatgaaagggaaggataattacttttgtcatatttcaaataaggttatggcatttgtgcagctagtttctgtgagggccttgtagaaagtttacattgatatttgtctgggaaacaatagcgctagacagagagggcacgccatagattccaacccacatctgcaaactcttgctgggtagctgagtgactgggcctagcctggtgtgaggaatgcgtgccctgcaacttcagagtcacaattcaattgattaaaagagatttgttcccacttctttctgggagccttgggtatacaatgtctgtattcacctcttgccttcaaagctggaaagagggaagagctgaagaaggaagtgttcgttagatttttttcctttaaatagtgggcccttctagtgtactaatatgaagcttttgaaaagtttgtgcatctaatatcaatggtgtgagggacatcatgagcttttttagaagatcattagatctgtatgagatcttgtgtcctagtgccttgcaagtagtggatatgcaataaacttttgtagaatcaatgtgtttttaagttttagtcccagaaattcactctatttaccttcttaaatgcttttggaaagatttgatacaatgatgtgactgaaggatataatgatgtgactgaagggtataatggtcgtgtgtttttcatagtacacaatgaacatcccttttctgaaaagcttgggaccagaaatatttaggatttctgatttttttcagattttggaatatttgcattatacttaactggttacatgtcactaagctgaaatccaaaatattccagtgagcatttcttttgagcatcatgtcagcacttaaaacattttgggttatggagggtttcagattctggattttccacagtaggggtgctcaacctgtaccgtgtaaactttggatcagttaaattctccttagaatgcctaggcacatcttagtttttgacttgaaaagcaattctggcactgatgtatacatttcaaaaatggcaatttttaagtagaaaactttcatggggtcagtaaaaattttttttattcccatttttttgcacattataataattacatgaaagactttttgacttgaaattcattcaggatatctggagtttgactgatgttagttcctgaaatgaactagcttaatatttaggatgctctcttcacaaaccccttgtactcttaaacctttttttgtttgtttgtttttgtttttttttttttgagacaaggtctagccctgtcacccagtctggagtgcagtggtgcgatcttggctcgttgcaacttctgcctcccgggctcaagtgatactcccacctcagcctccagagtagctcgtattataggtgtgcactaccacacccaactaattttcatgttttttgtagagatggggttttaccatgttgtccaggcagtattgaacacctaggctcagtccactggcctcagcctcccaaagtgttgggattacaggcgtgagccactgcacctggcctgaccttttaaattcatccgtttgtagtagatatttgctaaagctaagctatatggttgcagttaccagtgggcttattctgtttttttgtttgttttgttaaccccgtctcttagacatcacctcctgtaagacctagcttttattttttttttgagacagagtctcgctctgtcacccgggctggagtgcagtggcaccatcttggctcactgcaagctccatgtcccaggttcacgccattctctcgcctcagcctcctgagtagctgggattacaggcatgcgccaccacgcctggctaattttttgtatttttagtagagacggggtttcaccgtgttagccaggatggtctcgatctcctracctkgtgatccgyccgcctcggcctcccaaagtgctgggattacaggtgtgagccagcgcgcctggcccaagacctagcttttaaaaaatcactttctctatttctctgttgaacattaccaactctgattattcttattcttttgtcttgcattatttgtgtttgattaactytattttgcatttttaggtaatrtttcttattattttcaagttacttggagttgtagcttttcaactagaaaatggtatcaaggacactgatactgtcattgtttttatatcttayttttaatctatcccttcacccctaaaaatagagaagttgatatactaaagttgatctctaaatgtgtattgatttttgattctcttatcttgcagacacgttggtcgtcattgcctccgagcccactttagccctcagctctgtatcagaaagtaagtttctaagtctggagattatttatttatttttttttttgagacggagtctcgctctgtcacccaggctggagtgcaatggcgcgatctcggctcactgcaagcgccgcctcttgggttcacgccattctcctgcctcagcctcctgagtagctgggactacaggcgcccaccaccacgcctggctaatttttttgtatttttagtagagacagggtttcaccgtgttagccaggacggtctcgatctcctgaccttgtgatccgcccgcctcggcctcccaaagtgctgggattacaggcttgagccaccgcgcccggccctggagattatttttttttccttagggaagagcaatagattgttgacttagatttgatggatatgtacgacagtgggcagttgtagacagttgactgaaacttaagtaattgtggtgactatttatggtttgtgtgtatgtgtgttgtttgtttgtttttgagacaagctctcactctattgcccaggctagaatgcagtggtatgatcagggcttgccgtagcctcagcttcctgtagctgggaccacaagcatgtggtgtgccaccatgcctggctaattttttgtatattttgtagagacgaggtttcaccattttgcccaagcaggtcttgaactcctgggctcaagtgatccccctgcctcggctgggattataggcatgagccattgcacctggactttcatggtgtatatttattctcagcctgttgatgtcaacaattgcctttgtgttattttttaaaaactttttattttggaaatattttatactttcagaaaagttatacgaatagtaggatgaagttctacatatctttcacccacatttgccaactgttaacattttattgtgtttgcttatcactcttttttgtattttagattatgccatatgaaatttttatttttgtaggtcaaaactggtaaaatattaatgatttagtgtagttcagccgaatacatatttaattattagtattttcactgaatgctttaagggtaaattgtgaacatcatgaccatttacttctaaatatttcttctaagaacaaagaaattgttttacataatgcagtataattatataaacataattatcaaattcaggaaatttaacattgatgaactcttatctgatacacagttgattttcagatttttcatttgtcccaaataatatatttcatagaaatataatcagctaggcatggtggttcatgcctgtaatcccaacactttaggaggcctacacagaaggatagcttgaggccaggagttcaagaccagcctgggcaacagagagagacccagtctctacaaaaaattaaaaaataaaaaattagctgagtgtggtggtgtgtgcctatagtcccagctatggggaggctaaggcaggaagatggcttgagtccagcagttcaaggttgtggtgagctatgatcatgccactgcactccagcctgggcagtagagtgagacccctcatctctattttaaaaaaaagaagattggatgtggtggctcacacttgtaattccagcactttgggaacctgaggcaggaggatcccttgagcccaggaggtcaagaccagcctgggcaacatagggataccctgtctcaataaataaataaataaataaataaataagaaacagctatcctcaacaatttagtaggctgggcatggtggctcatgcctgtaatcctagcactttcggaggctgaggtgggcggattgcttgagcccaggagtttgagaccagcctgggcaacatggtgaaaccccttctctacaaaaaatacaaaaactagctgggtgtggtggtgtgcacctgtagttccagctactcgggaagctgaggtagaaggatcacctggatggggcaatggagaattgtgcatagcctgagcatggctgtttaatagttggtttcaacctagcccagtgacaaaggaaaccaagaaactactgaggtaccgagctgaatctagttcttgatttttgagaacctgaaagggaatcttgaaaagccagatgagagcagatggtaatgtatgagataaaactgtggccctggaaaagcataatctatttatgtgaatattttttaaatatacttgccctgccacccaacaagaagttgtgctttcattgccagacctgtgtattgggtgggtttagaaagcagagttatcggcctggcacggtagccatgcctgtaatcccagcactttgggaggccgaggcaggcagatcacgaggccaagagatcaagaccatcctgaccaaccaacgtactgaaaccccatcttgactgaaaatacaaaaattagctgggcgcggtggcatgtgcctgtagtcccagctactcaggaggctgaggcaggaggatgacttgaatccaggaggcggaggttgcagtgagccgagatcgcaccactgcactccagtttggccacagagcgagatcccatctcaaattaaaaaaaaaaaaagcagagttatcgtctgatatgacctcatcagatgattcaggttaactgaattaaagttggtataaaaataagataagtggaggaacatgttttcctaatactgtgggtttatccagcccaccatactgttaccggaaaaggggtcttgacccagaccccaagagagggctcttggatctcatgtaggaaggaattcaaggtgagtagcaaagtgcagtgaaagaagcaagtttattagaaactactcaattatatagtagggtgtcctcagaaagcaagtgggggaacatgctgtctttgagtttctttttttcttctctctttctctctctttttttttttaaatatatatatatatatwttaggtctttaaggttttattttattttattttaatttttaattttttttttttctttttttttgagacagagtctcgttctgtcgaccaggctggagtgtagtggcgtgatctgggctcactgcaacctccacgtcctgagttcaagtgattatcctgcctcagcctcctaagtagccggaattacaggtgtgcaccaccacgcctagctaatttttgtatttttaatagagatggagttttacaatgttggtcaggctagtctcaaactcctgaccttgtgatctgcctgcctcagcctcccaaagtgctgggattacacgcatgagccaccgcacctggccaattgttaaaaatattttgatgtagagtgttgctctgttgcccagggtggagtgccatgatgcaatcacagctcactgcagcttctacctccctgggctcagaagatcctcccacctcagcctcccgagtaactgggactgcaagctcggaccatcatgcttggctaaattttctttgcattttttgtggaaacagggttttgccatgttgcccaggctggtctcaaacttctgggctcaagccgtctgcccaccttagcctcccaaagtgccgggattataggcgtgagccaccatgtctggcctaagttttccttatatagggatcttgtctatgtaaggactaaactaagctgtgcctacatgcgggggaccagacagcatgacagaatttattattctattgatttaaagaaaactgtccttgacattttagtgtgtaagtacatcaaagcataactataattattttgaaagcatatgttgttatgggtattgggacatctggactttctgttgttggagtttgtccttgcaggtattaccaagctgcttccttagctgtaaacatgttagaaccgtgkgttgtcactggcaaggaatgtgccttgctagttttaagatggagtttatttatttattttatttatttttttgagacggagtcttgctctgtctcccaagctggagtgcaatggtgtgatcttggctcactgtaacctctgcctcccgggttcaagtgattctcctgcctcaccctcctaggtaggtgggattacagtcgtgcgccaacacacccggctaatttttttctatttttagtagagatggggtttcaccgtgttggccaggctggtcttgaactcctgacttcatgatccacccacctcgatctcccaaagtgctgggattacaggcttgagccactgtgcgtggcctattattttattttatttttatttttatttttattttctgttttctgttgctataacaagatggagtcgattttaaaatagtgtcactctggctctcctaggctcctgcttccctaacaaaaccttttctaaaaagatactgcaaatttttttttttttttttgagagagaatttcttgttgcccaggcttgagtgcgatggcgcaatcttggctcaccgcaacctctgcctcctgggttcaagtgattctmctgcctcagtctcccgagtagctgggattacaggcgcccgccaccacatctggctaatttgtatttttagtagagacgaggtttctccatgttggtcaggctggtctcgaacttgtgacctcaggtgatccgcccgcctcggcctcccaaagagctgagattacaggcctgagcaaccatgcctggcttggtattgcaaaatattgacttaataaaacgttatgcaaaatattaaaccaagtttacttttagttattttcaaacggtctggttttattttagtgctgttcctttgggaaccacggccaaagaagagatggagcggttctggaataagaatataggttcaaaccgtcctctgtctccccacattactatctacaggtaaggaaggattctggagccagagaatctagaggtagtgggtgaaagttctgaaggttgatctttagcctacttgatacttccctcacttttactcaaccaaaatactgctatgtagatgaggtgaacccttcagggtagagggagatgacataaggattatcttacaccttttttatgtggagatgactaaattctatcttgtcattacaagggtaatctattttgcaaaactaccatttagaaaattctggtaagtcaaaatataattcccattaattaaaacatttttgaaacaatttcaaatttacataaacgttgcagaaataacatacagagttcccatatacctttatatggaaggtatatagtatatatgctaagttatatagaagttgcaactttgcaaattcttcttcttttttttctgagacagagtcttgctctgttgccaggctggagtgtagtggcgcgatctcagctcactgcatcctctgcctcccgggttcaagcgattctcctgcctcagcctcccgagtagctggggctacaggtgtgcaccactacggccagctaatttttgtatttttagtagagatgggatttcaccaggttggccaggatggtcttgatctcttgacctagtgatccgcccgcctcggcctcccaaagtgctgggattacaagtgtgagccaccatgcccggccacaacttcttaaattattcagacatgctaataagcagattcccagctgcttaacatgtctgaatgatacaagaagaagttgcaatgatgatgatatccaagtattattcctgtatttgttttcttcttctttttttatttttctgaggcagagtcttgcttggtcacccaggctggagtgcagtggtgcgatctaggcccaccgcaacccctacctcctgagttcaagtgattcttgtgcctcagcctcctgagtagctgggattacagacatgaacctccatgcccggctaatttttgtcttttagtaagagatgaggttttgccatgttgtccaggctggtctcaaactcctggccataagtgatccacccacctcggcctcccaaagtgctgggattataggcatgagccrtcacgcccagtccctgtatttgttttctattgctactataacaagtatcacaaacttagtggcttaaaataacacagatgtrttgtcttaccattctttaggttagaagtacaacacaggtctcattaggctaaaattaagttgtttgcaggggctgcattcttttccagaggctccttgccttttccaacttttataggccatccacattccttgggttatggcattctttttctattttcaaagcaagcaatagcagagtccttctcgctttgtatcactctgacttcttctacctcccttttctcctttcaagggacccttgtcattatatttagacctccccaaatatttcaggacaatgcctccatctcaaggtctttaatttaataatatctgcaaagttctttttgtgatataagataatatattcacaggttctggggattaatacattgacacctctggaggggagggtgcattattttacctaccacagtctaccctctagccctcaaagtttatgtctgtcccatgacaaaatacattcaccacatcgcggtggccccaaaagtttcaacctactgtagcctcatctcaaagtcttaaaatttcatctaaatctccccatctgaaccagatatgggtgaggctctgggtataatccttttgaggaacattttctcttcatctgtgaatctaaagcaacaagttacatactcccaaaatacagtggtgggacagacataggataacaactgtagacattcctgctcaaaaagtgagaaaatggaaggaaaaaaggagtctctggttctaaccaggtttgaaattcagccaggcaaacaccatttgatttcaaggcctgagaataatcctttgcagctattggctttgccctctgggcttatagctccatccgctatccttctttgtgaaaggtgacacatgcttttgcagctgagtcatttttaacagcctcttttttgtctgtagaaatttcggggtatgacagtcttcttttcatcttctctctgtcacttttagtctatgctggcagtatttctgttggtataacattcttaagaacattgttgggaccaggcgcgatggctcacatctgtaatcctagcactttgggagaccaaagcaggtgaatttcctgagctcaggggtttgagaccagattgggcaacatggtgaaaccctgtctctacgaagatacaaaaaattagccaggtgtggtggtgcgcctgtagtcccagctacttgggaggctgaggcacaagaatctcttgaacctgggtggtggaggttgcagtgagccgagattgcgagattgtggcgccactgcactccagcctgggctctgtttccaaaaaaaaaaaaaaaaaaagagaaccttgtgggtctcctgcttgtgtcatgggaatttgctccattagacaagacgttcccttatagaattttcctaaataatcctgcctctgtttctgccttctgatgagatggttgaggggatctactagtaacatgcttaatttcaaaacgccttttatgtgactaaatattctgccctttcaatctttctcaggtattaacataaggttacatggccacgccctgactttttctttttgccaatgaatatccttttttttttgtccagacagagtctcacccagtcacccaggctggagtgcagtggcacgatctgggctcattgcaacctccgcctcccaggcttaagcaatccttccacctcagcctcctgagtagctgggactacagtgcatgtcaccacgcccagctaatttttgtatttttttatagacatggtgtatcaccatctctataaaaccatgttgcccaggctggtctcaagctcctgggctcaagtgatctgcctgccttggcctcccaaagtgctgggattatgtgtgaaccactgtaccaggccttgacagtaaatatctttttttttttttttttctgagacagagtctcacactattgccagggctgcaatgcagtggcgcagtcccggctcactgtaacccccgcctccctggttcacgcggttctcctgcctcagcctcccaagtagctgggattacaggcgcacaccaccatacctggctaattttttgtatttttcgtagagacggggtttcgctatgttggctagactggtcttgagctcctgacctcgtgatctgcccgccctggcctcccaaagtgctgggattacaggcatgagccaccgcgcctggcaacagtgaatatcttaattttagtatttttgctgggaaggctgagaatttcccaaatcattaagtcctgtttttttgtttgtttgtttgttttatttaagagacagggtttcactgtgccacccaggctggagtrtagtagtggtgtgatcatagctcgttgtaaccttgaactcctggactcaagtgatcttcctgactcagcctcctgagtagctgggactacaggtgcatgccaccacacctggctagtttttaattttttgtaaagacggtctcaatatattacccaggctggtcttgaacccctgagctcaagcgatcctctcacctttttctcccaaagtgttggggttacagctgtaagccaccgtgctcagcttgctttttatttaacagctcttccctcagtctgtttctttcctttcacattttactataaagagcaaaaagaaatcaggttgccacttcagtagattctgctttccacattatcgtgggacataattctgctaaactttctgccctatgtaacaaggatcccctttccacaagtttttaataacatgttcctaatttcctcctgagcctttactagctgaattaacattcatattttcctttttgaaatacaatttgtataccatacsgttcacacattgaaagcatacagtttagtggcttttgttaaatgcagagttgttcagccatcaccacaattttagaatattttctttttctttcttttttttttttttgagatggagtctcgctctgttgcccaggctggagtacagtggcatgatctcggtttactgcaacctctgccttctgtgttcaagtgatctcctgcctcagcctcccaagtagctgggattacagatgtgcatcaccatgcctgactaatttttgtgtttttagtagagacaggggtttcactgtgttggccaggctggtcttgaactcctgacctcaggtgatctgcctgccttggcctcccaaagtgctgggattataggcatgagccaccatgcccagccaattttagaatgttttcatcactccagaaagaaacactacatttcttagccatcaccaccaatcgtttgtccctcccagctctagacaatcagttatttactttccatcttataaacttacctattcygaacatttcatttaaatgtagtgataaaatatgtggtcctttgtgactggcttcttttacttaccataatgttttcagcgttcatccatgttttagcatatatcagtgcttccttcctttttatggccgaataatatttcattgtatgtacatacagtgttttatttacccatttataaattgatggacgtttgagctgtttccactttttggctattagaaataatgctgctatgaccatttatttgtgtacaagtttttgtgtgcacatatgtttcatttctcttgggtatatacctaggagtagaattattgcatcatatggtaactctatgtttaactttttttttttttttttttttaaagacggagtctcgctctgttgccaggctggagtgcagtggcgcagtctcagctcattgcaaccttcacctcccaggttcaagcgatattcctgcctcagcccccaagtagctgggactacaggcatgcgccaccgcgcccaactaatttttctatttttaatagagacggggtttcaccatgtcggtcaggatggtcttgatctcttgacctcatgatccacctgcctcagcgtcccaaagtgctgggattacaggcatgagccacggcatccggcctatgtttaacattttgaggaactaccagactgttttccaaagtgactgtaccattttacattcacactagcagtgtataagggttctagtttctccacatcctcaccagcacaacatccatatttctactaaaatctgttcaaggcaatctgggctttttaaaaatcatggtcctaaaaattcttttagtcccttcccactgcccaatttcaaaggcacttccacatttttgggtattcgttacagctgcactcctcttctagttaccacaatctatactaattttctatttgctgccataacaaattactgcaaacgttgtgacttaaaacaacacaaatttattaccttatagttctgtgggtcagaagtttgacaagatctccctgggctaaaatcaaggtgttggcagggctctgtttccttctggaggccctagggaagaatccatgtccttgcctttcctagcttctagaggctatctgaattccttggcttctgccctccttcctccatcttcagaaccagcaatgctacattgagttcttcagtcacatcatgctgaccctgcttccgtcatctcatttcttctttgactcctttcttctgtgagcctcttctgcttttcttttttctcatttctctcttctgctgttaaggacctttatgattacactgggcccgtcctaataatctaggatagtctatgttgttttgtttttgagacagggtctcgctgtgttgcccaggctgaaatggcacaagttttctacaagtttttaataaaacttgtggggcatgatcatggcttactgcagccttgacttcccaggcttaagtgatcctcccaggtcagcctcccaagtacctgggactataggcatgtaccaccatgsctgactaatttttaaatattttctagaaatggagtttggccatgttgctcargctggctttgagctcctgggctcaagctgtcctcccacttcggcctcccaaagttctgggattacggctcactccctctttatcttaaggttgtcttattagcaaccttaatttcatctgcaaccttaattcccctttgccgtaaaaggtaacatattcataggttctagagattagaacatgaacatctttaaggagactattattctgcctactacaacttcttaatacttggctgtgcatttcctcaattgcaagacagtctccaaagtacaaccatcacaatgttactatctaaaccgtaggtcccattcaaattttgccacttgtcccattaatgtyctttataggcctaagattgaacctagaattatatattacatttagttgtcatgtctctttttcctgcagtatgggagagatttttagtctttccttatttgttatgaccttgacgtttttagaatgttccttaatttgggtttgtttggtgttttatgatttatgcatttttggcaggaatacccctgcggtaatgctatacttctgtcagtacattgtatcaggaggcatgtgctaatgatttatcccattactggtgatgttaacttttgtcactgtttaagatgtgtctgctagatttctctactgtaaagttactgaataaggatgttgtattaattaatacatattttggcgggagatactttgaaactctaaatattctttctcatcagatatttactcaccagtatctgttggaggtacttgcctaaatcatttattactgtgatagttgccaaatgtaatgttgctaattttatatattataataatattttctagatttgtttgttttgatagggtaaagcttgctttttttatcagtatggactcaaggataatatggatcaagcattaatttccccaaaggattatactttgttattatttattttggtgttcaaattgtctcagacctggccaataggagttcttcaaaatgactcctgtgaaatcagtatctgggtgctagatgtgctcattgctactaggatgtcattgcttctaggcccggtctgtggatagaggtagcatatatatgtatgcaatctctgtcacatacatacgtgtgtgtatataagtatatacatacatcatacatacatatatacatatatacatacatctctgtttatctcatcttcagaagtggcattgataacagtttttgctgatgtctttgaagataagtccctgtaaatctgctttttgtttttttaggctaacccagcaaagcatcttgagctctgctactctcttgggtttctgccagtgaggctggccattttttaaccacctccacaaataccataacccttcagtttttttccaagccagattccaggaataatcctgtttgtagaaactggacatgccactaaaacagaaggaggctaataagtgatcttatttcttgcttctcaatcgtgaaactttcttttttaagagataaaagttttaggaggcccggtgcggtggctcatgcctgtaatcccagcactttgagatgccaaggtgggtggatcatgaggtcaagagatcgagatcatcctgatctcaggtgaaaccctgtctctactaaaaatacaaaaattagctggccgtggtggcacgtgcttgtagtcccagctactcaggagtctgaggcaggagaatcgcttgaacccgggaggcggaggttgcagtgagccaagattgcgccactgcactgtagcctggcaacagagcaaggctccgtttcaaaaaaaaaaaaagttttggggaagaattataatgaaaaagagaaaagagcatcctaaattattctgaatctgtatatttaaagccgtggccttttttcacaggtcatataaagaatggttgtaggttggtgaggtgagtctttcactaccttatttgcttttctggttatgtaactccagacatacttggggggaaaaaagcagcagggaacacggggctatatccagagtggcatgtcagggaaagatatctgagatacctgaagtcatattttctattacccattttttgggttttttgaaagaggcctggaagtaaatggttagtgatgttaaacatcttttcatgtacttattggccattggcagtctgggctgttggagaaatgtttttactttctggaggtatttttttattgttttttttgcttttgaggcagagtctccctctgttactcaggctggagtgcagtggcgtgatcacggcttgctgcaacctcgacctcccgggctcaggcaatcctccttcctcagtcccccaagtagctgagactatagacacacgccaccatgtccggctaatgtttgtattttttgtagaaatgggttttttttttttttttgccatcttgcccaggctggtctcaaactcctgagctcaggcagtctgcccacctcagccccctaaagtgctaggattacaggcctgagccactgtgcctgcccacatcttgattttctatactagactcttacctaatgttcaaacagggcctagtgaagaagacttgtctttgctccatggtgcccgaggcctcagctggaaaacacaaaggctagggcctgaattaatctgaagatccagtcactcacatgtcttggagttgattctggctcttggatggggcccttattttctcaccacataggtcctttcacatgtctttgtaggctgctttgggtttccacacagcatgaggaaggaaggagaattcgtaagtcatgcagcattacttctgccgcattctaccttttgaggccgtcggtcatcaagtcctgcccaggttcaagggtagaggctaaatacttgcttgatgagaaatgacaagattctggaagatcctgggggactggaaataatattatggttatttttagaaaacaatatttttaccttgtcattactgggctagccaggctatgattttaaccgtttttgaaaaatagggtaacatttgaattcagcagtttcatattacatcactcccattttgtatatcagtatttctgaaagatttctggaacagtgcatatgtttcttctattagctctttcagtcatgggatttgattcatctggtcccagagccccaagtgtgtttggaatcttccaatttcctcacctctttagggtttcaagtctttcagatcaatatttgttctgtctttttcatgctgataattattctctttgacaagwaaaataattgtgcaatctgtttcacactcttgtcatcaattagcataaaattgttcatcccagttaggaggctgactgtgtcagaatacaattttaaaacctcttttttgttgtccttgaaattgttgcaagcctcagctccttctgggtttcggtctcctgattcttcttaccaaattatgctatcgttctctgtccttggttatgtgkctgttcttccaccttttatatttctgttgttaaatctgagttgatcagagtggtatgtggctcttcttccaccttttatatttctcttgttaaatctgagttgatcagagtggtatctagttagtattaatatttttaatttatttgggaatactcctttcttacttactatgaccattttcattatgtaggcagaattttcttttgagatctttttaacctctttatttctcttcaaagtgttgaagatacggtttgattatgcttagtattctttgtctaagctaacattccaagatgagcgttagctttcttcagagactcttgttctttccattttacccaccagttctctcttgagcatgagaactaggtctagaataacaatgttggttgtccttcaatggaaagttgatgattcataatttaaaaaggggtttgatgatgaaaagtatttcagaactactgtggattaagaaatatatactaaatccagaagattggatataaaaatttgggataggtaacttattaggaaataagtggtatgttcagtttggatattttggggcatataataagggaggattcaaggatgaccatgtattatatgaaactgtggataaatgaaactcaggttttcttccatcagtgttatacctggagaaatagagggacccaggttgtattacagtgattgctttctttctttttcttttttttgagatggagtcaccctctgtcgcccagactggagtgcagtggcgtgatctccatttacgccaaactccgccccccggattcaagtcattctcctgcctcagcctcccaagtagctgggattacaggcatgcaccaccacgcctggctaaatttttgtatttttagtagagatggggtttcaccgtgttggccagcctggtctcgaacacctgacctcatgatccacccgcctcagcctcttaaagtgctgggattacaggcgtgagccaccgtgcccggcctatagtgattactttctaattgtatcaactgtatttatttatttagaggcatggtctctgtctctctctccccaacccgggctggagtacagtggcacagtcatagctcactgcagtctggagttcctggcctcaagcgaccctctcacttcagtctcccaagtagctgggaccacaggcctctgccaccacacccagctaattttttttttttttttcgtaaagatggggtctcattacgttgcctaggttgaccttgaactcctgaactcaacggcccccgccttggcctcccaaagtactaggattacaggtgtgagccaccatgccagctccaactttaatgagtgtctttgacccatgtttctccttgcgaaaggagttttgagttataatcatttttttttttctcagccctatcagtgatgcagtctggtaaaggtagggatccttctccataaatcagttttctttattctttaatttatttttgtaacctaatcctgatacaggtgttttttttttttttttttttttttttttggagacagagtttcactcttgttgcccagactggagctggagtgcaatggtgcgatcttggctcaccgcaacctccacctcctgggttcaagcaattttcctgcctcagcctcccgagtaactgagattacaggcatgtgccaccacatccggctaattttgtattttcagtagagacggggtttctccatgttggtcaggctgattgcgaactcctgacctcaggtgatccacctgccttggcctcccaaagtgctgggattacaggcgtgaggcaccgcgcctggcccaggtttgtatttttaaagtaaaaagtggaaacacggctgggcacagtggctcacacctgtaattccagtactttgggaggccgaggtgggcggatcatgagatcagatcaagaccagcctggctaaggtgatgaaacccctttactaaaaatacaaaaattaggcggacctggtggcaggcacctgtaatcccagctactcaggaggctgaggcaggagaatctcatgaacccgggaggcagaggttgsagtgagctgagactgtggcatgggactccagcctgggtgacagagcaagaccctgttccgggggggtaaaaaaaaaagtgaaaagacaggaatgcaaaagctggtgattttttgttttgttttgttttgttttaagaaaatattacctattcaggagaattgcttggacccgggaagtggaggttgcagtgagctgagatcatgccattgccagcctgggcaacagagcgagactctgtctcaaaaaaaaaaaaagaaaaaaaagtgcctatttcagaattagtttatatttttgccaagatagactctctactatggtgtcatcttttcctttttaaaattgtctttgtgtgtttctttacagttggtctcttcccatggcgatgtccatctgccaccgtggcactggtattgctttgagtgcaggtatgtatatgtgtttttacacacacatatgtgcttctttgaaaaacttggctgtttcattggccctagtctccgcctcctttgaaactcagcacttgatttagagggaacagtaagtctcttaagtttattgttcattcatccctttaacaattaattatgagtttgcactgtgctcagattcttttcttcttttttttctttttgagacagagtcttgctcttttgcccaggctggagtgcagtggcgcgatctcggctcactgcaacctccgcctgctgggttccagcgattctcctgcctcagcctcctgagtagctgggattacaggcatgtgccaccacgcctggctaaatttttgtatttttagtagagacggggtttcaccatgttagccaggatggtcttgatctgacctcatgatccgcctgcctcagccttccaaagtgctgggattacagacatgagccactgtgcctggcccagattagtttcttagcaaatttttaaaccattccctagcacttcctgatatcatgtttattgaaattatagagagcagagaaatgtaatagagatgggctggctgactgatcattgatgaaacacagtccaaccttatttttccagaagctcagttttagcacccattcttatcacctagacatgctcagtcccccaaagactagctcactaaccagtctcacaaaatcttgatttacagaccagaatgtctatttattcatttatataatatgaactgcagctacagagtgaattatatactggtcttagataattagtacatcctttttaggtaggaaggtttattatatggagtgcagattataatcagttttctgggatctgatgtatcttttcacagtagggatatactttacaagagggtcagctagatttaaaaattatgtctggctggtgctggagacatagacatttttgcttttttatgtatttattttctcacaagaatgtgcatgtaacatatttttacttttttagctttcctttatttagccttatagcatactttgctctcctacccccaccaaaaacagaaacaaaaactagattatgttccctggatacatgctcttaaagcattctagtttttctttcataatcatagttgtaatttacttgttcattgttgttcttccttactggattgtctgttccctgagggcttagactgcatctgtctgtatttttaattatctagtagggtacctagaatgcagtagataatttagtaaatatttggtgaatacaaaatgaataccactctcttttttgttaatgtgttttatatatttctgtcccaaatttctattccatttataatcatattttttggctctagaagtatcttattttggtcccctgcatattgactataataactacctaactagtattgtatttcaactggcatttctgtgtgatgtgattactagtttagctgaaagctattcagttcagtgggagccagaagaggttattgtacatgagagtgctgcataggtaaatctgagtttgctctctattagtctccttgagacattgggggaacttgtgttctctcccagcgaaggtgatctagcccatatatatccacagggagaacaggtgcaaactaggagtagtggagtgctttctaaaagaaatgctccaatgcactattagcacatactcaacaagacttctgttccaagttgatagtcctgggacctttgctggcaaaggaaaatgagcttatgacttagaacagtgtgtaaatccctgctgtgtgtacaaacttttctctcctgtggatagttccctggtatgtcttttttttttttttttgagacagagtttcgctcttgttgcccaggctggagtgcaatggcacagccttggctcactgcaacctcatgagaccagcctcctgggttcaagctattcttctgcctcaacctctcaagtagctgggattacaggcgcccaccaccattccctgctaatttttgtatttttggtaaagatggggtttctgaactcctgacctcaggtaatctgcccgcctcggcctcccaaagtgctggggttacaggcgtgagccactgtgcctggccccttggtatatctttaacctcatcctagggaataagaggaaatatcttgcctagaatcggtatgaaattatatacctgagagacagaagccccactgttttaccttatgtaaagctctgtctgagcccctccatcgcgtctcttttgttactttagcctgggagcaatgcctaagttttattcatcacatcaggcatcattacagtcttgccaggagatggcccatttgtacagagtagagcagatggcaaccttcaggtcctatcgtgtaagtgtgctcttgctccagaaatttgatgccaaatagagctttcgaggtaggaaagggagtttctattgacttttgctttgttgaagcagtggtggtattggaaaagtgctcttgtttctgtcttctgagaccctgaaggatctctcctaggcttctgtagactatgtttttaactgacgtggtcatcagtagggccagtggctctagtgtagggatcctgtatttaaggaactgctgatgagacattggcaggaattatctgaatctaagcctctgctatttgcaatctcatatatgtgtgtgtgtatatatttatatatgtccatttatagacatatatatgtagttttgttgataaggatagagactcctatctaagatctgatgccgtcatttttgttctttttcattcctttggttggtaaagggacgatggaatcaaggtataaggatgatttgtgttgttaggaatccatatgtagttcctggtttttaacctgcttgcactgaactggtggggatgatagggtaaatctcaagattaggctattctaactgtagattcataattacttttatttctgcttccttagaataagaaatttttagattgattaaggaatttctagatggatgctttctactcagtttggtgatattgatgaacagatttaatcctaaaaatcactgaaagaacaagagcagtttatttattaggctgtagtttcccttattatctcagtatatttgtcaccactaaatgaaaaaaagatactgacttttttatagactataatgataaaaaaatattcatttgtattcatggctaaaattgaatatttttcacaactgaagaattatttgggcagggtgcagtgattcacacctgtaatcccagcactttgggaggccgaggcaggaggattgcttgagcccaggaattcgagaccatcctgggcaacatatcaagacccagcactttgggaggctgaggtgggcagatcacgaggtcagatcgagaccatcctggctaacacggtgaaaccccgtctctactaaaaaaatacaaaaaaaaatagccgggcatggtggcgggcacctgtagtcccagctgcttgggaggctgaggcaggagaatggcgtgaacctgggaggcggagcttgcagtgagctgagattgcgccactgcactccagcctgggagacagagcgagactccgtctcaaaaaataaaataaaataaaaaattagcctggartggtggcatgcatctatagtctcagctactagggaggctgatgtagggaggattgcccaggaattcaaggctgcagtgagctgtcactgtgccactgcactccagcctgatgacagcaagaccctatctcaaaaaaaagaaaaaaaaaagaaaaaagttgttttttttctgtctttacccctttgaatggtggccttgcattcatcagcatatgtcctgtttttcctctctcctagttccatgatagaatatagtagctgttttctatagagtagaagttaagtataactacagcattttcttcaaatgttgaaggtccctccatcaaaatcgtaaaggaataggtttttgccaggtggatgacttaagcaaattactcagttctctaaacctcagcttattccttataaaatgggcatattaataatgcctatctcagaattcatgggatttcaagaaactttatgctctgggttttgctttatggaaacaaggatgaaaaacatgatacctttaataacaactgtctcttagaagataatgtgccctggaccgaatggcaagagaaattggatcatttgttctgaaatgaagtcagttccagcaactgtggtctttgcattcttgtggccctagtcccatccatttttcacacaacagcaagaaaaatcttttgaaaataaatggaatcatgtcactcccttccttagactctcctaatgactgtgttcactttagcacttagattaaaattcaaatatccacctttgccctgccagctctggctcttccctaactcattcctgccattcctccctttgcttactgtgctccagccacactggtgtttgaactcattggaacaggcaaaattatttcctacctgagaggcattgcatgttttgtttctttagtctgaaatgcccaccctgacctcttgctgcactgtgcttggttagttctttcttatcctttacatcttagcaaaatgttaactcaaagagcactttgcttaccaccatatttaaagtacaagcttccttacatctgttttacagtactctattccttcatagttcttattgtgctgtgttgtttctttcaaagcttttattacacaagttgtaattattttattttattttatttttgagacagagtctcgcttttctgcccaggctataatgtagtggcgcgatctcagctcactgcaacctccacctcccgggttcacgccattctcctgcctcagcctccccagcagctgggactacaggcgcctgccaccacgcctggctaattttttgtatttttagtagagacagggtttcaccatgttagccaggatggtctcgatctcctgaccttgtgatccgcccgcctcggcctcccaaagtgttgggattacaggcttgagccactgcgcctggcagttgtaattattttatttgctaactttttataaatctgggtttttttgttttgttttttgttttttttgagacggagtcttgctctgttgcccaggctggagtgcagtggcgcgatctcagctcactgcagcctctgcctccaaggttcaagcaattcttctgcctcagcctcccgggtagctgggattacaggcacccactaccatgcacggctaatgtttgtatttttagtagagacagggtctcactatttggccaggctggtctcaaactcctgacctcaaggaatctgcccgcctcagcctcccaaagtgttgggattacaggcgtgagccaccacgcccagccaaatctgcgtcttttattagactgtaaagtcttcaaagagtggatactctatctatcttatttaccattcataccctctagcactcaataggtgcttagaaaatctttatttactaaatgaacatacccatgtaaatcactttgctcatagtggtcacttagaagtgttcatttttcccaccttctaattaacctcctgttacacattagaaattagatagggataatatatagtctctactctcaaggatagaggaatctaaggagtaagacaaatatttataatgcactgtgatagcttttttttttttcgagacagagtttcgcttttgttgcccagactggagtgcaatagcgcgatctcagctcactacaactctgcctcccaggttcaagtgattctcctgcctcagcctcccgactagctgggattacaggcatgcaccaccacgcctggctaattttgtatttttagtagaggcagggtttctccatgttggtcaggctggtctcgaactccggacctcaggtgttctgcccactttggcctcccaaagtgctgggattacaggtatgagccaccatgcccggccatgatagctttttaataagagatatgagaccccagaggagaaaccaacaaatacagttgtcccttattatctgttggagattggttccaggattcctcctcagataccaaaatctacagatactcaagtcccttatataaaaggatgtggtatttggatatatcctatgtacatcatatacttaaaattatctctagattacttataatacctaatacaatgtaaacgctatgtaaatagttatattgtttatggaataataacaagaaaaaaaaagtgtacgttttcagtacagataaaaccattcatttcccccacccaatattttcaatccacagttagttgtatatccacagatgcagaatccatggatgcagaactcaggacacagagttgacagcactctgagggagttagaaggcttgaaagaagtgtgaacaggagagtttgtgaagaggaggtagaggagggcattccaacagagaaattcctttatggaaaggcatagggattggaaatctcccggatcattggatgattatgacgaggtctgtttctttttttcctttttttttgagatggagtctcgctctgtcggccaggctggagtgcagtggcacgatctcggctcactgcaacctccgcctgccaggttagagaaattttcttcctcagccttccgagtagctgggattacaggcacctgccaccatgccaaactaattttttttgtatttttagtagagttggggtttcaacatcttggccaggctggtcttgaactcctgacctcgtgatccacctacctcggcctcctgaagtgttgggattacaggcatgagccaccacacccggctgaggtctgtttcttaagaatggtgtttatggggccaggcgcggtggctcacacctgtaatcccagcactttgggaggccgaggcaggtggatcacaaggtcaagagatcccccggctaatcgccaacatggtgaaaccccatctctactaaaaatacaaaaattagctgggcatggtggcatgtgcctgtagtcccagatacttgggaggctgaggcaggagaattgcttgaacccaggaggcggaggttgcagtgagccgagatcacgccactgcactccagcctggcaacagagtgacactctgtctcaaaaaataaaaaaagaatgatgtttatgggagaagtgacagaagataaggctagaaagtgggccaaatggtgaaggactttgactgccatgctgtagaccatgaaaagccattaaaagttcatgtgctcttttgttccagtaacaggacaagctggcctcctggataaatacaaaataagttatttattttaactatagagattttatggctaatatataaattttaaaaagcatgttaacactagtttgactttaaaatagaatttattaaaaagraacttgacaatttttgtttgtttgtttttttttgagatggagtcttgccctgtcgcccaggctggagtgcaatggtgccatcgtggcccactgcacttctgtctcctcctgggttcaagcaattctcctgcttcagcctcccaggtagctgggactacaggcatgtgtcaccatgcctggctaatttttgtatttttagtagagacgggatttcaccatgttggccaggctggtcttgaactccttacctcaagtgatccgcctgcctctgcctcccaaagtactgggattacaggcatgagctactgcgcctggcctgcaatgttttgaaaggttgaaagaggagactaatagcactcttatattgcttaggatccataaagattaaaatactcagggctgggtgcggtagctcatggctgtaatcccagcactttgggaggctgaggcgggtggatcacctgagatcaggagtttgagaccagcctggccaacatagtgaaaccccatctctactaaaaatccaaaaaaaaaaaaaaaaaaaaattagccagttgtgggtggcgcatggctataatcccagttacttgggagactgagccaggagaatgaattgaacctggaaggcagaggttgcagtgagctaggatcgcaccagtgcactccagcctgggtgacagagcgagactctgtctcaaaaataaataaataaaaatactcaggatttttcatagtgacagaaaaagtctatttgactttttcctataaaagtctagttgaatttaggtacatgccttgagaatggcagatagctgaagttgcaataatgaatgagtctaggaaatcataaataacaagataaaacatacaacataaagcatgagattaggaagagagaataaagatactaaacaacagatattttaagctttgaaccaatatatacagatattcatgtatctgtatatgaattgtacaattagcttgaatggatataagaatggtcctgcatgttttgggtagtctttaaaaacagtcaggccaggtgctgtggctcacgcttgtaaaccccgcactttgagaggccaaggcaggtggattgcttaagaccaggagtttgagaacagcctggctaacatggcgaaatcccatctctactaaaaatayaaaaaattagctgggtgtaggtggcacattcctgtaacgtgggctacttgggagactgaagcacgagaatcgcttgaacccaggaggcagaggttgcagtgagccgagatcatgccactgcactctagcctgggtgacagcgagactttatctcaaaaataaaaataaataaaaataaaaaataaaataaaaacagggtcagatggaagaatcagaacttttgtgagagattgcctgaatttgtaggcaaacctgctgctcaggcaggtagcctattctctagaaaagccaaaagatttacagattcataaagtaactgatgggctttgaaaatgactgtgtttttcttctgtcatgagatgggatattagttattgattcttaaatatcatctgttatactttagaaatcctggttattccagactgagtgtagaaaaagtgaaaaaagtgcactttggaatgagacagatctgagttcaattctaactctgtcactaactgtgagaccttaccttgaaaaagttatttgtcaccacacctgccaccaagcctcagtatttttgtccacaaatttggataataccttttttttctctttagtttaaaaaaatttttttgagaccaagtttcgctcttgtctcccaggctggagtgcagtgacataatctcggctcactgcaacctccacctcctgggttcaagtgattctcctgcctcagctttcccagtagctaggattacaggcacgcgtcaccatgcctggttaattttgtatttttagtagagacggggtttcaccatgttggccaggctagtcttgaactcctgactacaggtgatccacctgccttggcctcccaaagtgctaggtttacaagggtgatccatgtacccggcctcgtttttaaacaattttttaaaaatggagatgaggtttcacagtgttgcccaggctggtctcaactcctgagctcaagtgatccgcctaccttggcctcccaaagtgctgggattacaggcgtgagccaccatgctcagcctggataatacctttttgctgtgtatgggggcaacagttagaatttagagaccttaaaactagtataaattctttcacagtggatatgatttgctctccatttgagaaaaagtttatgcatgtcactgagtaatgtagtgtagcttaaaacatcaacaaaagttccagactcataaaaacatatgcattaaatatgtacaattttttcatgtttcaattatacccaataaaggtattttttwaaaaaaatcaaagatagcccaaatgtgttagagacataagaccggaatgtgattgaaattaagtaaggcaataattcagttggtagtattatattctttctcaggatacaaactggcagcctgtgggccatgtttggtcaacagatgtactttgtttctttgtgctgtgatgaaaagaaatggaatttgagtgcatttaggtggaacatacatacttcccctttccaacagttttctatgagcaccactagtctatatggccttaattgccttatactctgcttgattcacacatccgtttggctccttaggcatttgggtttgacctgcctcttgggaggggcaaagaatgagatgagtggtggtgacagtaagagggaaatgggtaatcagaaacaaaaaaggaaaaaagagaaggccaaggaaccaaatattcagtgtttattctctagagtccaaaggagagaggcattgaacctggaaggcacaaattatccagtcagtggagaagtgtgtgtggtgcacgtgtgattccggtttatccagcctcaacttggcctaaatgacatttctgtcaaaattagttcctccatttgctctaatctgctaatttttaatttggctttctgggtcttggattttggttattagaagaggttttgccatctatcttctatactttagtctcttgtaattttgacaagcctgaaggtaggctttgggctgtagaaaatgcaccaagagttcttgtcatctttgagatctcttgagagatcttgtagttacttttcactctgctacatcatcatttctttttctacttaaaataatgcctgttaaggattataaaaattaaatactatatttgaaattcctaatacaggcttggtggtgattattatttacattaataatcagaatagttaatcttatacctctcagaaaatgtgtgatatttgtagttaaacaagtccttctcagcccttcctatttcacaactgctgactgctacatcttagtccttgcattaccaagttgggatgacctggcaaaactcttaccagaagagaaaatgcttctcagaaatgctttactttacctcagtacgtgagtactcttgacctcaagagaggttgtggggaagcagatgggcagaatacatcatgatgagattagtgtgacaacrctggaaataaaagaacagttatgtgctgtcacactgagttttaatcatcagttggacagcttcatgaaggctcttttagatgttttcttttcatttgctgtgacatctgcatgggctttctaggaagaagtgtctgaaagagcttatgatgacttctggaagtgacaataggacttgctgacagtccgcacagttacatatataggacttaactggggtggatccagcaggaactggtcttggcagtcaagaaaaagcactatttaatttttctcagtgattagataggacagcttcagtggctttattttcccaattgaaattgttcagctgttagaggactctctgaggcactcagattctaggagtggggtcagtttcctgatgcccaatatactgaacatcagaggagaattcagaaaatctcatatttaattctcatatgtttttcacttgtagtgatgaaagctttggctaaagtagctttcaattgaattaactgattaatattcctgtttgaagaggtagagccttttttgaaaattagtgaggcagccagccaaaatgatctctctcctgattatatctggcttggaatctggtaatgatcccagatctccttgacctcccagagatttgtataaaaaaaaatttttcctgattacaagaacatattaccaagaatgaaaatattatacaaatgtatacttagaaaagttgcccataatcccgccagtcagaaataaccagtattctatgtatatccagagactgtatcattttatgttttttgtttaaggactcaacccatcagaaaaatacctaattcaaatacaactattgctatagccattatttactaaacatttacataattatttaaccctcataataatctgagaaacaggagtatcttcatttaagagcttaagaaactgaagtggccgaggtgggtgggaggccaaggcgagtggatcacctgaggtcaggagtttgagaccagcctggctaatgtagtgaaacctcgtctctactaaaaatacaaaaaaattagccgggcgtggtggcacacacccgtagtcccagctactcgggaggctgaggcaggagaattgcttgaacctgggaggcggaggttgcagtcagctgagatcgtgccaccgcactccagtctgggcgacagagcgagactccgtctcaaagaaaaaaaaagaaaaaagaaaaaattggtgtgggggtatgtagtagtagaatgattttgagaacatttgacttatttagaggcagtcttctctttttgaattgattaaactaattgacataattctgtattattcataggaaaacaaaagctgaagacactgttattcacatcctagtatttccaagagttttgactctcgtaggtcatttgagagtaggtggtgttatcctaggataacaccatatcagggtctggttttctgttggttaatattggtgtgggtggccatccctgggactcagctgtgagcctgttgtcctatttgatgcatagatcagggatgagtttgcccagatatctaaggcatatatttggctattgaagtttcagagctttgtgctggcactgaaattcaaaagatagttttgaatttcctatcaaaactaccaaaagaggggttcctgcagtcttctataatagcttatcatctatccagagtgtcaaagactctgaaccctcttgagtcatatcttcctcccaaatgttcatcaaactgtttgagttcaggtttacctcagtgtcttcagtaattattttcatggtgctcctaagtcaaggtaaatacctaacacttttgttttattagtttgttagatccaaacagcttatttatttcttagccattgagtagacattttttaaaaaaaatcatccacataggctgggcacagtggctgacaactataatcccagtgctttgggaggccaaggcagaaggatcgcttgagcccaggagttagagaccagcctgagcaacatagcaagaccccgtctctatgaaaaacaaaagcaaaaacaaaatcatccacataaatggaaagaaaaaaatatttttatttcattcttaaataatcatacttttttgtttgtttgtttttgaaacaagatctcactctgttacctgggctggagtgcagtagcacaatcacagctcactttgtgcctggctaatattttttatttttgtttttattttttgtcttatttttagtagagacagggtctcattatgttgcccaggctggtcttgaattcctgggcccgagtaatcctcccacctcagcctcctaaattgctaggattacaggcatgagccaccatacccagccaatcataattacttactaataggatgtatatgctgttggatattatacaactcctccaaccttagaaatcagattggatactgccaccctcatttcttgttccacagtgattttcacacagtacttcatttttgctgaaaacccagctttgcaaagatgtgatcattgaaagaaatctaacatctaatgttgaaactgaactaccttgagctagtagtggttcacatgatgaccaacagatgttaagtatcactgtgtttcatttgaatatgtaaaatatcctgtaggacctgtgagtttgctttggtaccccagggcagcttggtgtagtttggaaaccacagttctagcaatgatcccaaactatcaaatcagggtctctgggagttgtgatgtgggtactcttttttgcttccccaaaatattttttggtgattatgggaaacaactggcctcttctttttttctttttttttttttaattcccattttacagatgatgtcttatttctttgtgtgtgtgtgtgtgtgtgtgtgtgtgtgtgtgtgtgtgtgtgtcatttgagatggagcctcacgcctcactctgttgcccaggctggagtgcagtggtgcgatctcagcttcctgcaacctccacctcccaggttcaagagtttctcctgcctcagcctcctgagtagctgggactacaggtgtgcgccaccacaactggctcatttttgtatttttagtagagatggggtttcaccatgttgcccaggctggtcttgaactcctcaccacaaataatctgcccaccttggcctcccaaagtgttgggattacaggcatgagccaccgtgccagccaagataacatcttatttctaatttgagtttcatatttgttatacttgatttctcagtcattggtggtcgatagccactgagctccaacagataatgcagccctgtcagacattaaaatattcatactttttctttcacatagggaaataatcttccaagtatatacacatagcagttacattatatcattatggttttgatttgcatttgtctaatggctaatgatgttaagcacctgttcatgcactgattggccatttatttatcgtccttggaaagatgtctattcagatccatttgtcattttattgattgagttgtaagagttttttatgtattctggataaaagtcctccatgatttgcaaatattttctcccattcctttgagttgtcttttcactttcttgatggtattatttgcagcacaaaagttagtaattttgatgaaatccaattcatctgttttttcttttgtcatttatgattttggtgtcatctgtgaaaccactgcctaatccaagatcatgaagatttatttctatgctttctactaagagttttatagttttagttctagcatttaggtctctaattcattttaatttaaatttttgtgtaatagagatttgaatgatttaaaatttttcctctcttcagaggtagcaacactagaagataaagataaaaaaagggccaggcgcagtggctcatgctggtaatcccagcgctttgggaggctgaggtgggcgaatcacttgaggccaggagtttgagaccagcctggccaacatggcaaaaccctgtctctactaaaaatgcaaaaattagcgaggcatggtggcatgcatctataaggccagctacctgggaggctgaggcacaagaatggcttgaacccaggaggcggaggttgcagtgagctgagatcacgcttactgcactctagcctgggcaacagagcgagactctgtctcaaaaaaaaaaaaaaaaaaaagagaacctaattttttttctgactcttctctggactgagtacactgtttttaccttttcttagttagatgatgaactagatgatatagcaaggcttgatgtctaaactggcaagtgaagtttttatagagacggatgttgaaaggaggaataacatactaaaacatatggcacatttagtttatgatgagatcccaagtagtctgtctcccatcataaacttgaacatgagyttaaatcttctccttttcaaggccgggtgcagtggctcacacctgtaatctcagcactttgggaggcaaaggtgggcagatcacttgaggtcaggagttcgagaccagcctggccaacttggtgaaaccctgtctctactaaaaatacaaaaattagctgggcgttgtggtgggcacctgtcatccccactactcaggaggctgaagcaggagactcgcttgaacttgggaggtggaggttgcagtgrgccaagattgcaccactayactccagcctgggtgacagratgagactctgtctcaakaaaaaaagaaaacaaaaatcttctccatttcaaaatggtttagaattgtatgaggtgccaggggtcccagttttatgtatcatattagttgtaacttatgagcagctgtgacaagctacttggttttctcctcaggggtctctctttttggcatgtcggccctgttactccctgggaactttgagtcttatttggaacttgtgaagtccctgtgtctggggccagcactgatccacacagctaagttygcacttgtcttccctctcatgtatcatacctggaatgggatccgacacttggtaagttaattcgggatttgcacattttctctgtgaagggagtggggagactgggaggattctttccttcattactgggtttagtgctgttcttttttttttttcccaagagtggagtctcgctctattgcccaggctggagtgcagtggtgcgatctcagctcactgcaacttctgcctcctgggttcaagagattcctgtgcctcagcctcttaagtagttggcgttatagacgcatgccaccactcctggtttttgtatttttagtagagatggggtttcaccatgttggccaggctggtctcaaactcctggccttaagtgatccgcctgcctaagcttcccaaagtgctaggattataggcgtgagccaccgcgcccagctagtgctgttcttaaggttagttgtgactcagagtcctcttggggaaagccagacaagttcacaagttcccctgtgtgttacctggcagtcctgctggtggtgtagctgagcaatggtataggcctcacagatacttgcagggtctcattgggaactcttccttttttaatttaatttaattttattttttgagacaaagtctcgctctgtctcccaggctggggtgcagttggcgcgatcttgggtcactgcaaactccacctcttgggttcaagagattctcctgccccaacctcccgagcagctgggactacaggcgcctcccaccacgcccggctaattttttgtatttttagtagagatggggtttccccatgttagccaggctggtctcaaactcctgaccttgtgatccacccctctcagcttcccaaagtgctaggattacagacgtgagccactgtgccctgctgaactcttcatttttaagagggatatttaaaagagatccctgaaggcatagaatgcatgtttatgacataaatattaattggtacctatttatgtgtcaggtactgttgtagacactggggattcagttatgagctagataaccattgttgctgctttcattcttccgttcctgttgacccagagtagtgcttctgacaggactcaaatagattaccttttcttatctacacattatattgcatttctgttttgagatgttggacagaattgggccaactttaatagaaactgggtgccaagaattccaggtttcaatattgaggttaggaatctttttttttttttttttttttgagacagagtcttgctccattgcccaggctggagtgcaatggtgcaatctcagctcactgcaacctccacctcccaggttcaagtgattctcctgccttagcctcccaagtagctgagattacaggtgcccacaaccacggccagctaatttttttttttttttggtatttttagtagwgacgggattttgccatgttggccagccttacaggtgcctgccaccacacccagcaaatttttttttttttgwattttttagtagagatggggtttcaccatgttggccagcctggtsttgaactcttggcttcccaaagtgctgggattacaggcrcgagccactgcacatggcaggaatcatttaatagattggaaactgtccatgttgcctcctatgtgacctcatcgtctgctcaaaactggtttctaaaattagccaggtatggtggtgtgcgcctgtggtcccagctacccgtaaggctgaggtgggaggatcgaatgagcctgggaggcggaggttgcactgagccgagattgtgccactgcacttcagcctgggtgacagagtgaccccatctaaaaaaaaaataggcgggcacagtggttcacgcctgtaatctcagcattttgggaggccgaggcgggcggataatctgaggccgggagttcgagaccagccttaccaacatggagaaacgctgtctctactaaaaatacaaaattagccgggcatggtggcacatgcctgtaatcccagctactcgggaggctgaggcaggagacttgcttgaacccgggaggcagaggtttcagtgagctgagatcatgccattgtactccatccagcctgggcaacaagagcgaaattccgtctcaaaaaaaaaaaaaaaaatacaaaaattagctgggggtggtggcatgtgcctgtaatcccasctacttgggaggctgaggcaggagaatccaggaggcagaggttgcagtgagccaagatcatgccactgcactctagcctgggtgacaaaagtgaaactcagtctcaaaaaaaaaaaaaagaaaagattttatattttgtagtctccctagttttgcttccaagaaggcaattaaaattcagttctttctgtattttcattacttctgaatctgagtcaactgtcagatggatgcttttgccttaatttgactttttattacttccaaatcatagccttagagacaagcactttctggatttcagtctggtccaatagacagtttaatggaataaaaaaaatgagagactaaattacttattaaattaagtgtctgtatcaactgttccctggggcagtgttcagtttgatttaaaatgactttttacttccctgagggggaggcagtagagagggaggacatttccattaatgacttcctattccacagaacaaagctctgtaaagaaaatcagctgatcagcttcctctgttcatattttggctcagrcagagacttgccctatatttgtctttgtctcaatatgggggtaagagaggggaggttttayaaaattgcaraacttagagcttttctgccctggttcttgcctgtgatggtaatctttttgttgagggaagtgaagaacctaarggtccttaagtctgcttttattttttcttctagcaagtactggctgtgagtgtgggacaggattttgtgttttctgtgacagtctgcagtttttggcctctgaacttgatagttgacttgccagaagatctaatgggggagtgaggagtgaaagagtaggatgttatagggtctgtggcattctagggaatatccctgcctactacygctacccagtaggactcactctctataaaacattgtccttatttaagcaaaacaactctttgtggaatctgcttgactcctaatctcctagttagaagcaatttgagggttgaggtggaggcatcttctcatcttgatttttttttttttttctgggcttccatcttttctctgaactgactcctaatttaggcagttttacattcagactgtgggtgtatgtgtgtatgtgtgtgttaaggcgccatgtatgtgggaagtgtggaaaatgaagactgcttttgccccatgggctcatttagtgacttataatataatattaatatgttaatatccctaagacacaagagagtcaaaattagtgttttgttaaatgtggggctgggggcatggtagctcatgtctgtaaccctagcactttgggaggccaaggcaggtgaattgcttgagctcaggagttcaaaactagcctgggcaacgtggcaaaacttcatctctaccaaaaatacaaaaaattagctgggcatggtgatgggtgcctgtagtcccagctacttgggaggctgaggcagraggattgcttgaacctgggaggtcaaggcctcagtgagctgagattgtgccactgcactccagcctaggtgacaaagtgagaccctgtctcaaaaaattaaaaaaaaaaaagtgggggtgggtggtggggtaggggctgggtgagatggctcacacctgtaatctcagcactttgggaggctgaggcgggaggattgcttgagcccaggagttcaatactagcctgggcaagacataacaagagtctatctctattttttagtattaaaaagaaaagtgggttttaactcaattggtagaaaaccaatttagtggcatgctaccaacaaaaaaagaaatttaaatagaatagaaaatataggctggggctgggcgtggtggctcatgcctgtaatcccagcactttgggaggctgaggagggtgtatcacttgaggtcaagagtttgagaccatcctggccaacatggtgaaaccccatctctactaaaaatacaaaaattagcttggcatggtggcatgcgcctgtagtcccagccactggcagggctgaggcaagagaatcgcttgaacctgggaggctgacgttgctgtgagccaagatggcgccactggagtggctgggtgcagaagttcacgcccgtaatgccagcttttagggaagcagaggcaggaggatagcttgagtccaggagttcaagacctgcctgaacaatataatgagaccccgttctccacaaaaaggagaaaatatatgttttttaatgaagtttatttatatataaaatatataaatatatacttgtatatatatggcaccacttagtaatggtaaatattgttttatcaacttttgctatattatatatacatatctattgggttccagttttaaaggtatttcttagtggagtcacagtcaaaacaaaattgagaaatagtgttctagatctcagagtatcctttagaatactagtcctctgataaatagagtttccctctataaaaagattctgagattgactgtatctaggaaatcaggcatattatatctctcttttggagattcacagtgtgcattagtaaactgtaagaggctgggcgcagtggctcacgcctgtaatcccagcattctgggaggacaaggcgggcagatcacgagatcaggagatcaagaccatcctggctaactcgatgaaaccccatctctactaaaaatacaaaaacaaaattagccaggcgtggtggcgtgtgcctctagtcccagctacttgggaggctgaggcaagagaatggcatgaacctgggaggtggagcttgcagtgagctgagatcatgccactgcactccagcctgggcgacagagtgagagtccgtctcaaaaaaaaaaaaaaaaaaaaaactgtttagaaagtcttgcagttaaatgtttatgaactttgtatgaccacagaacttttttttttttggcccatacaatggctttcaacattctgagagcaagtgtttggaagaatacaccttgagaaacattaatctagatgtgtggtcctgaggaaaagttgtatctattcattctggaagcttttgtataccgtatggggcctgtggcattctagagaacattcctcctaccatcaccacacaatagaacctgattttctgtcattggaataagtggataataggttccatactgtgggttttgagaagggtaaaggtggggcataagggtagaagcgcttttctctagaatcatgctgagaggagatatctattcctttaggtagaattactttctgagacaggaactgttaatgtcctatttactgaaattccttttttttttttttgctttgtccacagatgtgggacctaggaaaaggcctgaagattccccagctataccagtctggagtggttgtcctggttcttactgtgttgtcctctatggggctggcagccatgtgaagaaaggaggctcccagcatcatcttcctacacattattacattcacccatctttctgtttgtcattcttatctccagcctgggaaaagttctccttatttgtttagatccttttgtattttcagatctccttggagcagtagagtacctggtagaccataatagtggaaaagggtctagttttccccttgtttctaaagatgaggtggctgcaaaaactccccttttttgcccacagcttgcctactctcggcctagaagcagttattctctctccatattgggctttgatttgtgctgagggtcagcttttggctccttcttcctgagacagtggaaacaatgccagctctgtggcttctgccctggggatgggccgggttgrggggtgggttggtgaggctttgggtgccactrcctgtgggttgctggcttaaaggacaattctcttcattggtgagagcccaggccattaacacctacacagtgttattgaaagaagagaggtgggggtggaggggaattagtctgtcccagctagagggagataaagagggctagttagttcttggagcagctgcttttgaggagaaaatatatagctttggacacgaggaagatctagaaaattatcattgaacatattaatggttatttctttttcttggatttccagaaaagcctcttaattttatgctttctcatcgaagtaatgtaccctttttttctgaaactgaattaaatactcattttatctttgactctccttgaaatctagagaaaccaagaaaatggctgttgggaaggaaccaatttcctcctcttccctcgggtctcaggcatttacatcctccctctccccgcaatctgacctttaccaggagggaaacagttctcctacatctcatcattggaaaagttttcagggaatcagatagaacttagccagagatttaaatatcacagaraagcctcagagaaggaaggagaaaaagaaaagaagtgacgcatgtagagtgcttttgggttataggcaccaaaatcccattaaggactgattataagcttcatggtacagttcagcaaattatgattcattgaggggcacagaggaccagtgttggtgacagctaggggatgatgacctgaggttataggcttggggtgaatgaagcatagagtttttttttaaaaaagaagggattgttgaaaacctggcaaaaatgtataatttaatgagaaaacttgctgcttttaaaatccatataggccaggctttagcaggcatgctgttttgatagtttttgggaactctggaataagagacttatctcatctgtcacttcgagttgttggccagccagttaaagctgtgggtcgaagaggggaaatgttaactggctggtgtcaattggataggaagaccttagttaaggtggggacccgctgttttaacagtcttcattcagggtcccaaatagtatttggctttaagtaatgattggttttccctttttactagaggggccctgggaagtccttgtacctttcctccattttaaaccagctgttctctactttgtccttggaatgagggacaagtgatcatgacagaacactttgtcattgggactgggaaaggtttggcaagggcattaaatttaacagccagtgccaggaaaatataaaatggggtcaatgataaacagctgttagaggctggaaaatgggtagggcagttgaattttttggtggtttcgtaccatttgggtgattgaagcatggtagtgggtgggtggggggtgtgacagagcatcatgtttgttattctgccttaaatttctacttactgtctttttcttctctgtcttccaatcactttaatatcttcaattttcaaactatatttgtacttgggcttagatagaaagtcttacacaagcatagtatcttctactttggttttccctaccttttcttccccaccttctccaaacacacatatacatactctactcaattctatttctgattttgtagttgttagttgtccatgctcaggataaaaaatgagtgggtagggttgagggactggttctttgaggttctgccctttttccatgattcagaccaactttctcttggtcatttctggagtataactgactcaattcttgtaaaaatgtgttccacccaaaccactgtatgttcttttccctactttattttctcctaccttccttctcctaattgtgttacaagaggcagccatagcaagaatggaaaatccagatcagtaaaagattcaacaaaaaaaagtttattttccaaatttgcttttactcccaccccaaaatttccctgtttcacagttctgactgggggctcttgtttatttcactgagtcgctatacgggtttttcagtgtgtggccacttggtccatatgaagttccaggtttgtatttctggacctcagctagattaggccctgcccagagttctagcatacgtggacttccaggtgggctcttaggatttggctggtctttggggacctggagtatgacctgcagaggggtgtgagctttggagttcatctggggaattgaggttggcagctggggagcttggaattatggttggacttcgtgcttgttgtacagtctttgtgatagacttctttctgagtttcttctgactgtctggatcatggggctgtcagtgataagagtgggagagatagtcatgtctctggtcaggcccggatcattcctaatgcacctcaggattctaactccctttctccccataccatgggcagtagatcaagtttcaaataagaaaagttaaatttgatttctctaaccaccctcccccaccttgagattagatcattttctactgttgggggtatgatgtccttagcccatcccttcaggcctcagaaggtgattaaggactagtcaagataagacaaattggttagaggtcccccatgctgggatagtggtggcataacaatagacattttttgaggttgaaaagaaattgagactacagggttttgggttagatgggaagaatagataccttgcctaagatttcaggacacagcccattggaggccttgagtaaatcaggatttttctgtatccatttggtgagggaggcagcaccagcagttgtacgggaggtcagggtcacccgagcagggggtatcttcagaggcatttgccaggtgcccatgaaggaaccccaaggatttgcctaaaaatgaaaagggattcctcagtagggcttctcactcccagtaactgacttagacctctgtattatttcctttctttacctttaggaatgcatggttatgaaacaagactgaaagcataatcttcccacccttccttatccccctccctcatttaggctttgcaggcctaattttttcatcccctttactctgccaacttaaattccacatccttaggccgagtgtggcaaaggagtacccactgcacaaatgtcatcacctgaaggctttcatttatacagatcattgatcaatttaagaacttctgaagggtgctaaacacaactctatcctgctgggtaagctggccggaagttcaggggctctcacattacaacatgaattagattaaactttaattttcccgataatggctgtgagagactgcacatctcccagttctgtgccttaattatttgactttcttgataggagtgaagatagtatctcaccttggaacggggcacagaaggcagtagatgaccacgatcgttggcaataatttgagtgtagccttcatgagaagagatgctctggggtacaagtgggagagataaaggtttgtgaggggaaaaagggaagtatttggggagcttggtcagagaaggatatgggagtttagagaatgctaaaaggagttaattgacagggagagcatgaggctatcttgtaggtgcactgaacatggaatacctcttttgttggcttagtgggagaccagttctgcagatacttggatgagaaagccttttcatactgtggagagaaagataagtagccctatgagacttcaaggccccaaacccaggaaatgaagactaggcacaattctttagatttgaagaccaaaggcctgaccaaccatgtaggctttaagtcactatgacaagggtgtaatttgtttggtctagatgtgtgctgtccagcatggagccgggagccacatggagctgttgagcacctgaaatatgactagttcaaattgaggtgctttgtaaatatgaaatatgctgaatttttaagtttttttcttttctttttttttttgagataggatcttggtctgccacctgggttggagtcagtggcatgatcctagctcactgcagccttggacacctgggttcaagcgatcctcctccctcagactcacaggtagctgggactacaggtgcatgccaccatgtccagctaatttttaaatttacttgtagagacgaggtctcaccatattgcccagggtggtctcaaacccctggcctcaagcgatccttgtgcctcagcctcccaaagtgttgggattacagacgtgagctacaacacccagcaggttttggagatttagtacaaaaaaagaacgtaaaatgtctgattataattttttaaatactgattaaatgttgaaataatatttggatttattgggttaaattcaatatatttaaattttatgttttaattttttcatgtagctactagaaaatttaaaattacatttgtgggtcgcactctttttgttgggcagcactggtctagatcaggagttggtaaactatggcctatgggccatatccatattgctgcctgtttggggatggcctgagagtaagggtgatttttatagatgaacatttacaattgattcagtcaaatggaacactaactttgaatcccagttaagtgaaatgttttctcaacccccaaaattccattattttcattagtagtacaaaaaattgtactcagttatattttgaatttgtcaaaaatgttatggaaaaatgtttttctttaattatgcaagtagctacagaatatttttgactttgccacttggcctgcaaagcctaaaatttttacactccgcccttttacagaaaaaaaattgccaacttctggtttacaccctacaaatttaaccaagagatacctttggatcgcccctgggctctctctatccctgaggaggtaaaatattatctcactccactctcagctatctgttcaaagatcagaatcctatgagaggggacagtccaaagatagaatctgaaaaacaaaagtaaacgttaaagaaatggagaatgggaacttacctggttggcactgtagttagtggccatgatcttgtgctgtttacactcgttgcttggcaactgcagaaggccgacctcctgggactaccaatgagcagaggctgcctttctcttctgcttattattattcacttccttggctcacactgcccccatttgttttctctggaacttagattcatttttattttacagacgggaaagactgagtaaatgtgagaaaattagctgaatagccactactttttttctggcataacctacccctgcttaagaacttccacgggcctttgattggggtttttaaccactttaacaaaccatgtaaccctgagagctatgcttgttggacaacatggtgtaatgtaccacaggctgtagagccagatactggggtttgaatccttattcaacatgggaacataggagctatatgacattaaacaactgtcttgtcttcactaaatttctatcaactcatttgtattgtggggataatagagcctgcttttacagggtaagtgagataaaatgaataaagtgtctagacaatatcatagcatagtaggtattcaatcctggtgagatcctgtttataaggcccactactttgtcttatcaggcagaataacaaaggaacaatatttaaaaagcaactagctcaaatctgtccccagaaggaaaaacatatcttgtccttggtccttaaaaaatttcctctgtcactgtctagaatcagcacctaagaacacaggcgtttagtgttgactggaataaaatggaatcgggtgctggtgcagggagattgagcagggatgaagagagaaaatcacagagtggaaaggatcaggtttggagagttcaatggggggctgccaggacataagcctaatatgtgtgggacaaggaaacccctctgaaactcataaaatggtattgtaatacccatctatgaggtggttaggagaattaataagtaagtagaactgtgctttgtgaattgtaaagtgaatttatatataaggtgtcaagatgaaagggaaaaactaagaaataagttgcccaaagatatcattaggaccaggagaccattataaagtatatccaggccgggcacggtggctcatgcctgtaatcccagcactttgggtggccgaagcagacggatcacaaggtcaggagttcgagaccagcctggccaacatggagaaaccctgtctctactaaaaatacaaaaaattagccaggcatggtggtgcatgcctctaatcccagctactcgggaggctgaggcaggagaattgcttgaacccgggaggcggaggttgcaatgagcagagatcatgctactactgcacttcagcctgggcgacagcgtgagactccgtctcaaaaaataaaaaataaataaagtatatccatcagtcccttctcttttccttcttcccccaaaatcctcatcttaaccaacacaccaagtataagagcactcctatgcttctgcagatggagggaagaacagctcttgttttataggctctggagttaatacctggataatgtgagatctggaaagataactcatgagcttagtccctgtggttcttatcactctctagagaagagttctttaaggaccaaggactatctttgctctaggatatccattttggccctttaatctgcaatgataggctagc

SEQ ID NO: 94433 - DNA, 54070 bp, Homo sapiens
ttcattcaggcagggtgaggtggctcacacctgtaatcccagcactttgggaggctgaggcaggcagatcacctgaggttaggactttgagaccagcttggccaacatagcgaaaccccgtctctactaaaaatacaaaaattagctgggtgtggtggcacgtgcctgtaatcccagctactcgggagtctgaggcaggagaattgcttgaacctgagaggcggaggttgcagcaaggtgagatcgtgccactgcactccaacctgggcaacaggagccaaactccgtctcaaaaaaaaaaaaaaaaaagaaaagaaaaatttcattcaactttactttacttgggattgaatacatatgaaatgtgctttcaatacataaaaatcatagtggacagcagcaaaggagtgggagtagcagtggaggaggagttgcggcagattaaggagaatctgagaattcctattgtaattattttggaaattgataaagataattcacacttctaagaactcaagactttactttttaaaggaccaaaataaactcaagacaccttgccaacacttccccacctctcaacaaattgattactcttttacacataaaactgaaacagttatggcatcaaaattgatagcaacgaaagtttgtaaaactgtatttcagtctctttttcttgattccaaagtgcaagatgcagggttttcataatcctttagcaatgcttctcctgtaaataagccttcattttgtttggcaaaggcagtttttgaaataagtctattctggtatgctgacataaaacaaatgtcatgggtgctgcaaagaacaaaactgtatgaattgtagtattggattggtcagtcttacagggtaaattgcagatccaggtaaccgagaccttcaataagaaaaaactctattttccagagtccctggttgaatgttcaattagatcaactaattgtcctttcacatctggttgctcataaaagcaaaacctaccattcgagtgttcaattctagtgtgaagtgttttaccatgggagcaaaagcttgagcttgaaagataacagtcattatggctatctgggacaagaaaaaaaccatctagcacatttgctcacttttcttctgcctgtcagtgtatgattgcccccagcaccattattattttgcaggttttttcagctcctctgtaaggcttgtcacaaccatagtgtcactactttggacagaatcatcaactcttgcaaccccaggaggacagtcaggattagaattcaaatgacagtgggtactttcagacacacacatagacaactgcacctgtgagtccacagaagttcctttagattctgtattggaggtagtaatgatgaaagtgtcttcaggaatgtcttcatggcttgctcttgggctctgcattgtaactccttacaggtaccaatgaacaagccattcagagatggatccacaaagatctctggagcaacgaccaggtcctgctctacccgattctcagctttggggatagaattcccagaaacatctgtgtccggagttggttccttccagtgggttcttggtcttgctgacttcaagaatgaagccgtggaccttcgcggtgagtgttacagctctttaaaggtagcacagacccaaagagtgagcggcagcaagatttattgtgaagagcaaaagaacaaagcttccatagcgtgaaagggtacccaagcaggttgccagtggggctgggggcggccagcatttattcctttatttgtccccgcccacatcctgctgattggtccattttacagagtgctgattggtccattttacagagtgctctttggtgtttttacaattctttagctagacacagagcgctaattggtgcattttacagagtgctgattggtgcatttacaatcctttagctagaaacagagcgctgattggtgcgttttgtttttgtttttttttttgagacagagtctcgctctgtcgcccaggctggagtgcagtggtgcaatctcagctcactgcaacctccgcctcctgggttcatgccattctcatgcctcagcctcccaagtagctgggactacaggtgcccgccaccacgcctgactaattttttgtatttttagtagagacggggtttcaccatgttagccaggatggtctccatctcctgacctcatgatctgcctgcttcagcctcccaaagtgctgggattacaggtgtgagccactgcacctggctggtgcatttttacagagtgctgattggtgcatttacaatcctttagctaaacacagagtgctgattggtgcgttttacaatcttcttgtaagacacaaaagttctccaagtccccacccaacccagaagtccagctggcttcaccactcacttccatgggagaactgtccagacaatagcatgacacccttgcaaaggataaagcctctcatctaaaggcatagaatactgaatatagtcttgaggcataagtccaataagtacaggcacatgttccttgaagtgaagatgcaagtctccattctgaaattttgaactctttactttgttctttgtatgcagcttcaggctgaagatagtgaaaatccgtgccagacttggattggaagaatgaaccaaggctttgagtctcttcgtctcatctccgttttgatacgtgtctccttagtttgtaagccaaggagaggactacagtgaggattgtggagggaagtggaccttattggtctttgagctctcacatctttaaagactgttggtgctgagagaaaaagtatcctcatctggcagaactcccatagggtgtgctccccttgctgttctgcttttgttttgcagaaagctgcctttttcaatgtactcattaggctttcattgttttttccttttttacctttttcatctttcactgttgatatcacaggtggccatatctttaccagtgcagctaccaaataagaaatcatcttttccacattcactagttagtgatggttgttgtactaccatgaaatcagtttcttctttacttttattcaggttacaagatttctggaaggttttaagatcaattttaattagtctttgtgactggttacttcatccaggggaccaatttctctctggaatattagtcccgcacccctggagagcctgtgcggctgcatctccctccggaggtggttctggagttggttccttttggtgggttcctggtctcgctgacttcaagaatgaagccacggaccttcacggtgagtgttacagctcttaaaggtggcacggactcaaagagtgagcagcagcaagattcattgtgaagacggaaagaacacagcttccacggtgtggaaagagacccgagtgggttgctactactggcctggtgggtgggtgggtgggtgggtgcggaatgtggccagcttttattcccttatttgtccccacccatgtcctgctgattggtccattttacagagtgctgattggtccattttacaaggtgctaattggtccattttacagagcgctgattggtccattttacagactgctgattggtccattttacaaacctctagctagccacagagcactgattggtgtgtttttacagagcactgattggcgcattttacaaacctctagctagccacagagcgctgattggtgcgttttacaatcctagctacagagtgctgattggtgcattttacaatcctcttgtaagacagaaaagttctttaagtccccacccaacccaggaagtccagctggcttctcctctcacatctatgtatttctttggcttcatttaacctttggagccattttttttcagcagcagtgcaacagcagccaccagcccgggtctcatccagcgctggtgctactgctgtgaaatgtgtgttgttctgagcagctgtatttgtgatactttgttacacagcagcaaaaaaagtaatgcaacatcagtggtgttactgggtgacaaagtttgggattggggttgaagacccagctgatttaattataattggttctaaatttaaaattgcacataaaaaaaacccagaaatcaatgtgaacaacaataaaaaacatacaaaagcacttccttcaatgtctagatcaaggcttctttctcaccccctccaaccttacctgtttcctccctagatattcatagagagtaatatattttatcatctaaatagtcttctgtattgctctctagtagctttttgtgtctacctaactaggcttcagattccttgagggcgaggatttctgttcatttttgtgccccccacagtgccttgcacatagagactctagtaaatgttacttattggctgaagaattaggaacatgacctgcatttaacaacaaaaagagtttttgttaattagctagcacccgctcatcagcaaggcctaaacatctgccagtggaatctgagaagtctcttctaaaagttgaaaagctgagtttactcattacagatagggaacttgtagtaggtgtgtgtgtgcgggggggaggttttaccagttaaatcaaattacaagaggttggtgctcaattttcaggagagtttgtgtagtgatttttgtctttttcactgcatgatgtgactcttgattatgggatggaagaaattagcattatgaattttctctgtgccatttccataattaattgtttgttgactgttttgaagaaatttaagcagaatttgaggacttagttttaaaaaatgtagtgaaggggctaggtagcaaaaactttttgaagaaattcattgacctgctttcttagatcaaggactttttgaaataaaaaggctctcagagatccaacttgtagcctccagtggcttgtaatactttcttgctgatgtggcaagctaccttaagtcgtttctagaacaagaggtgaagtataaataccaatgtgacaaaatgtctgaacagtagacttgaaactgcaggaagatcgtaagaaccgatttgttcaaggaagtagaggcaattcatgactcaatctagacgtgtggtttaggcagatggcaagtgaattcatttatcattgttgatctgctttgagctcagtggaatcgccgactgtgacaatgtgcagagctagctggtggaaatgaagtcacaactcgaggagagtcatggattttgacgaacgtgaatcacctttaacatttttatggctgccttcggagtgcaaacgcccagcatgtccctgagttattaaacatttgccctatcaccgtgggcaggagtattctgaataccaaaacgattttgaaatttcaggctatacggccaacattgaaggtgtctgcattcaactggccctgtgaaagcttcagtctttttcatcgaagtgctgaaatcgatggccgagtcacaatgaagacgggctcaaatcggaaccctctcgctcctcgttttgagcagctgtctttgagaggcaatcttctgaattgactggctcagaattgatccgtgagagtcgtaaccatccgtttttgtacgaatacagttgataaacttttttagacgcctttggcatttatgtttaaaacgacaccacctgctaagtaacaaacactcttcttaatcgcggtggcaaaaacgtatccgtcccgtgtgtgtttgtttttacccttccgctacactcttaagaaacttggccgcttccgccccagagagtgccctaaccacgagtcgggttgacagggctgctcgcatgcgcggtctccaccgtggtgtttgtcgcaatgggcgctgcgcggaggactacatggaatctcgactttgcagcttgaagtcattttgttggcggcgctggttaccggctacctccgcgcgggcacttgattgtaacagaaagtagttccggcccatgttgtttcggccgaggagccgtcgccgccatttcaagaccgtactaggtagatggtcaattagagttcccagggtttgaagcctgtaactgctgccgccgctcaagccctccagagcattgctacggctgctgcccttgtactactacctccaaatacgttcttgctggtagtggcggcagcaggaccaattacctcttttttgctctccctcgagaagctccagatggcgtcttccgtgggcaacgtggccgacagcacaggtaccggtgtcccgttctaccttggcagatgcccccttggggtctcgcgccgtcctctaccttgtatcactccttccctcccttccctcgaaccatccccattacatcagtgacattgctaagcttttcgtggtctactggcatctgatcacatcgggttttccgctgttgtccgcttcccgaacatttcctcctcctcccttgcttgctttttgctgcctttcttgctttgtttttatttcgtaaatgttctagcattccactctctccaggcgcttttatcacacgtgcgcgcttagaatgtcgtggaatggactgcattggaatccctgccctttcactcctttgcagcggttttctcccctaattccagctcatcgcctctcctttttcccctccatctcctccttcatctccccccccagtcttttccccttagccagatttggtccttctctgccaatctagggcgggggtgccgttccgatgtaatcatatcctcactttgcatcacccgaggacgatcaaaagctcgtcgatggtgccacaagtcacctcgagaagaggggacattgagcagcaccctgctaggcagtgcctttctggtgttctttcggttgagcggtcccggtttagattggaaatttccaggggtttcctttgccatcgcccaattccaccgctgccctcagcctggatttcccaccctgtccgcggggaaccacacccttcccttcgcgaggttgccagccctgttcacttcctatccttgggggagaaaccaccccgatgctgctgctttggcgttgaccaccctgccckcccaattctcgctttgtgttactttctcgatgtattcctccgccgccgcctctgggtctgccatccccattcttcagcccagtatctctttattcacagggtgtaatattcttttaagtttccatccctgcttgaagagtttgtaaagcaactggagtgtagctgcacaagtacaaggcggttgcccttttagacacttcagtcgcgagcatttggtactgaaaatacgaaaacaaccaaattgtaggagtgtccttcagctgcctttccatattgaggcgatttgggcggaagggggtggggaattgggctgcgcttctgaggtttcccgcgaggttattttttggttgtttctcagttgagatgtgtggagggttttagctactgttcctggaagttgtgctgtaagtagtaggtgaatcgtcaatagtgtcttatccgtaattgtagggagtgggattaataattagtccgtgctcctctccccacgtctccaccgtgattttcaaaggtttaagattctgtrctggattctgtactagcttgccctttttaatgtgttatttatttgagaaagctgtcgtttcaagtgttaaaatagcagataagcggcattgaaaagtgacaaagtaatgtgtgaaaacaaggagctaggaagttctagagacttagctaaaatgtaattttagtttctattaaagatataacctctcccagatgtggatgcaagtctcaatgctctttgtgttggtggtcagctgtgcattctgtcaggaaatttactttgctttcctcagtatccggaacgctcatcagctctgatgattggggagctgggctcaaatttgaactagtcaccttaaccttggtagaattaaataatttgtccatggtttcccatttcaaccagctagtgaagtgctacggtcgaattcccagtttaagtatttacagttgtgacaagcagttttttttttttttttttccctctctgggctttagctatatcctttaaagatctttatgtatctggattaagtcacttgcagcgaagtgcttttatttattcattatgttgcgctttatcaaatatattttagcgtccatcctccctccctcccaacgttttgaccattgcagttgcaggtaactgcctggcttatataggcttgtttgcaatgtcttaatcctttagtcaataccagagctgtttggaaaatgttagtgctaaaccaacgtgggtgggatttagccaatttagtctccttttgagtttgggatggtagaggagcagtgtaatcttgggtctttatttaaaatgtttgatgacccctttaactattttggctgttgtcaaatgacaaacatcttgtttatcagctgttttaaaaatagcactttgactttttggtttttcccttaggctcgtttctacttgtccttttaaagaattaaattctgaaatatacaaaaattgatataatttaaagaattaacacatctggtgtcctcactgaggttaagattgatagattgttaccagtactccacctcaacaaatccaacctgaaatatggcacaaaatattacgtttcccaatatgttattctgatattattaagtctttgtgaccttgcaaatcacacgtttaatattttgtttctgtatgttaactaaggtataaggaataatgttcagtgaatccttagatgctacctatgatttataatttaaaagtacaaagtatttttggtcataaaatgtaatctcatatggaagtaaatattcctttctagtttgggaaagaaagtattaatgggtgaattctaaaaatgccaattctgcacttgatgttaacttgaagatatacataacgtgcagaacactctagtgctttacatagtttcaagcatttccatttttaagttaaatataccatatttttacatttttttggtttacrtttctaactttttgttttcccccctccttccctcaaatgttttgatgattctccagaaccaacgaaacgtatgctttccttccaagggttagctgagttggcacatcgagaatatcaggcaggagattttgaggcagctgagagacactgcatgcagctctggagacaagagccagacaatactggtgtgcttttattactttcatctatacacttccagtgtcgaaggctggacaggtaggagatgttggggtacctgctcgtgattgctgcctctgggtgctgagcttgaaaaatgatacttaaatatttgaacttgaaatttttccagtaccgggtttcaactsagccgccaacgcacatctgctctcttgcccacttgtgacatgcccagctgccagtttttctccttccttttgtggtggtggttatattatcagtatgactagggaccttttctagatttttctatctgggtctgctgctttctagactctgttcaggtaataaattattatcaatgtatatctgagcatccagtctccctttcatgagacctgtcagtttgagggactgaaatgctcagaaatgatggttatgtatgctgtggcaggagatgcatacctggagtttcattaagttgttatggtgtgttgcttttagttaatcagttgaattaatcaaaagggaagaatttgtgttcctgtccttttaataattgttattctggcatatttagacacttaaagatgtgcatcattaaatcttaaatggaaaatgagactcgtgcacatagctttccattttttatcttaatgatcatgatttccaatgtggtgggtttttttttttttttttttttttgagacggagtttcgctcttgttgcctaggctggagtgcagcggcgccatctcggctcactgcaactctgcctcctgggttcaagcgattcttctgcctcagcctcctgagtagctgggattacaggcatgtgccaccacgcccagctaatttttgtatttttagtagaaacggggtttctccatgttggtcaggctggtctcaaactcccgacctcaggtgatctgctcgcattggcttcccaaagtgctgggattacagacatcagccaccgcgcccggccaatgtggtagttttgtaacaagactctagttagaatttttttcttttttttgaggtggagttttgctcttgtcacccaggctggagtgcagtggcgcaatctcagctcactgcaacctccgcctcccgggttcaagcgattctcctgcctcagcctcctgagtagttgagattacaggcgcctgccatcatgcgtggctaaatttttgtatttttagtggagacggggtttcaccatattggccaggctggtctcgaacacctgacctcaggtgatcctcccgcctcagcctcccaaagtgctgggattacaggcgtgagccactgcgcccagccaataattttatttaataagaaaaagcttttcattttgaaatctagaatacctccacttttgaaaatctttgatttcccaaatttttcttgctatgcactagttaaaagataaggtattatataatgagcaatagcacagatctcaaactgtttgagttgcatatgggccataccttcttttctgtaacgtgcatacccatgcattaacacttgtygccttttccagatctgctcactttagcactctggcaattaaacagaacccccttctggcagaagcttattcgaatttggggaatgtgtacaaggaaagagggcagttgcaggaggcaattgagcattatcgacatgcattgcgtctcaaacctgatttcatcgatggttatattaacctggcagccgccttggtagcagcgggtgacatggaaggggcagtacaagcttacgtctctgctcttcagtacaatcctgtgagtaaaattttaatggttactttcccttcctagaaacccagaaagaaacatagtgtgatatttcagacactaaagtaggttttcacatggaataaagtcaaaagtttagaaatgcgtatgtacttaaaatggtgaaattgcttttagctggtctgcgttatgctaaaatatttgttttatttagcaagttatatwaaaaagcataaaaattcttattgcaagaaactacatcaattttaaaataacacgtataaagtacagagcacatgacttttttctgttgtgattaactttggataaattctgataagtgtttgcaagttaattgattttcaaggaatggtggataatgggtcttaatctgtaaaatctgtaatataaaatagtttgaaacaagatgccactatatggaatgatgtgaaaattaggctacaaaatttcttcctcaatatcctattctcttctctttcaatgtaattagaagtcatagaatttagatgatactacttatactgggcttttgattagtttaaaaattttttttgtctaagttgcagatgtgttctgggaacaagtaaggctcagctggcagaccttaaattcatactgtgtttaggatctccgaaagatacaaaaacataagactttccctcagaacttatgatgtagttagagaaagtagatgtaaacttaagaggtaaatgatagtggggttatagaaatctagaaaaagttcccaagttacattgtcaacattcagttttgtaaccaacctggaaatggctaatagtttattttagctaccgtttactgaaagtctgtgtggtcagacactctactgacagctttaaatgattggtcttagttaatcctcacaataattcttcaaaatagatgatattatttctgatttttatcaattaaaaaaaaaccatggactcagggttatgtggctttcatggggacaaagctagtaatgaagtattaatagatattaaaacctgagtctgaatatcctcaaagcaaatgttgaagtgaaaagaaataaaagtgggatgatgtgcccagagggcactcacccatcaaagcagcccttgagcacagttaaaaaaccattgatcatattttgctgtcccttattttttggttaggaaactgaaactaaatttagtagtttgttcaaagatccgaagtcacttctcatgatgatatctattaacaatttttgtagttaattttgagagtttaaacgtgtcctttttagaaaatccattgctttaaaaaacatttttttttaagagatggagtcttgctatgttgcccaggctgtactcatactcctgggctcaagcagtcctcctgcctcagcctccagagtagctgggactataggtgtgtgccaccacacccagcttctaaatttattggtttttgaatggatacagtgaatacctccagttagcactcttggaggtagcaaatgaaactaatttcttgtctatcttttctgagacactcagtgtatatatatgtacatttgagtgactttttgtaagttttattgcaatactaatctagctagttacccacataaagttttagggagcctggtatgtactgccactgggccttggaccccatttttcccagggctcagggctcacctctgtacccagttgtcacagtaagttctttacctttattaatcaggttgattctactcttattgatagtgtaccctcttacacagctgtggttcttgccatctttaactctaatgcccttggctcaggtttccagttgcctatgtgtgtagcagagcagtcattgctactgatagtgtacccaagcagtaggactatgctgagaaggaaaactaaagtgagagatggaaccttgctatttaatatctaacctgctgttagcaggaagcttattgttgtaccctaccaaggaagtgagatagtactaaaataaatcatgggattacctcttgaatgcattgaatggccatgtgttgtcatctggttctatgtttcttctagtggaaggtgctgctttacttatttattactgtttttaccaataagaatgaaaatgggattgtgcaagttcccttgatttcaactaaacatgccatagtgatcatattttaatttatttcaggatatctaaagtcttaactagatttaaacttactgtcaaatgcccgttgtcagttcagtactggtagaaccttgcgtctgttccttatgttcttgttgacagtgcttaaatgcatcattagtacattgtgtacctgaatcatagatgtagttggcattctatgaaaaatggttaaagaaactcaggttattttggttttgcagcagtgaaagagtagaatgttaaggtggtatctttggtaaccttggtaactgttttcaacagtgtttatctttttaagttaatagatatgtcaatttagaagttgttctctgtgacttgattatagaaattatctttgagacagctatctcatttttttcattctgaattatcttctataattataatgttgggtgttttcataattttggtaagattttagtctgtcattttttttttttttttggagacggagttttgcccttgtcacccaggctggagtgcagtggcgcgatctcggctcactgcaacctctgcctcctgggttcaaacgattcttctgcctcagcctccgaagtagctgggatcacaggtgcccaccaccatgcctggctaattttttgtatttttacaaaaacaggctttcaccatgttggccaggcttgtcttgaactcctggcctcaacagatccgcctgcttcagcctcccaaagtgctgggattacaggcgtgaaccactgtgcctggcagtctgttgtatttgaaggtgttattgcagatagcaccttgcagtgacagcacatgttctttgacatggtgactcactagagttgcctatacctggcaattccttttgcaaattatgtataaaattgtcctttctgtaacggctataaccctgagttgttttaaacaggtctgtttctgaatctataggttgttgaattgttgcttgtgctttgattgtggatgcacagaatggagagctgctggcatcctggccatcatgtgtgttcctgtcatgttatttgttacttgttactgctgagcctctcttatacagctgcactgtagaaaaccatatatttcgattcttctctgttctgctttctgttgtatatttcgattcttctctgttctgctttttgttaaggttgctgtgcaaatgtcacatttaaatatgtgagtgcttattgtgcatacaatgmtttgttaggaaatggggagatgtgttgtgggggaagttgcgggttataatataagacaggacctgacccgtaaaggaaaaaatggtgtaagttccttggatgataattgttggagagtattaatcagaagatttcctcgagtgggtgcttatgacctaagcattctgtaggaaggtaaatagcaagtagacttccttggctgaagtggtgagtcaagtagtaacaagaagtgaatgtagtagaggagagtcaattggaagatttataaagaatagagaggctgaggagtttgaatttaatttgagaggcaattgagaattactgtaggtttttatcgacctgattttacttcatatgtatgtacgtgtctagatgttgtggctggtgggggtgggaggctctaggaggaaaggcaggaaactgatgcaatcttaggagaaatagttytacaggaaaatcttgctcatttctatctccttttattctcacgattttcccttgtatacagtgccctcctcctttgtctattaaaaccctactcatccttcaaggcccagcttaaacttctcttatgagctcatcatctagttctcttaaaattctttactactgagtgggcatttagtgtgtgccttgtcttttcacatagattgtaagccccttgatgataaggattctatatcttttccctatagttccaggcatgttattgaattgagtaacagtttgcctgaaatgtattaacctgggatggataaaatgggctagttttgagaaatataattgtcaaaaacattttgatttgacagatgaagcagaagtgatgtcttgggttttgaacttttgggagaatggtggtgcccgtgcgttttctagaaattagctgttcatgcacataggtttggatccccaaacaggagaattggatttcaccgttacatttaatatgatgttttagcttttcctaaaactgccttattgattatcttatagtaatcttgaagataatgtatttttaactatgagcattgtgttaacttgatatagtatactgtaatggatctagatgataacaaaatatagatatgctgtcaggacttaagtggcatccatccaagagttcatagaaactagagggtaataaaattacgcaacagctggctactatgtatggccattacagtcattgttggagaattattgcaagacttctgattattatgacttagaaaaggcataggaattggtaaaagtccaaacatgtataaccacaattatcaagtagtagaaggagcttgtatgcatggattggattatgcagtcatggtctgccaaaacaggggtaaccctttcagtttagaaaaaaacataaccatacaaagtagatagcaagattatataattcattacttctgagagtatagtgttaaaaagtgctcaggctaattagaggagaagtcaaataagattaatggtacctttgatgttttgaggattagtattagccttttgtgcttgaagtgatgggagacaaccttactctctagaacatcagtcattgcttgaaggacagtattgagtcagggagatgatggaactgacccagtatggctgaccgtaagattgttgtgtggcagcctgtactttgttggcagactttttggttcacctgatggatgatactatacaaccacaaaagctgtttatcagtagaattaagtgattttggaaaccataayatagttccagagcaaatcatatatatgatgatttttcggcacagttgacaaaatttcactttctaggacttaagtctctttcacccatggaacagtttggaataataagcatacttcctgttgtcattgtttctgcctgttgactggtagatgtgactgacaatggcaaaatagggcaaataaaaatttaagctcactgttgtgatgagtgtctcatccagatgaatggactgatgagtcagatgactagcagcacaattgagctgctaataaaaagcagagtcaactgcttttcattattcacccactcaactctaatggcacttaatactaatgagtaatctagtggcaggtgccaggattgaggctttggttggataattcttctgcccgatagtgaaatgaagtcagagtttctaaatatgcctgacagcctaagggtaggtttgctcataggtagtcatttgctaaatatgtttttttccactctggaaaattttcggtccttgatacagaagtgattcatcataaccttgaataacatagttggacaaatatttgagatgtgtgtgtgtgtgtgtgtgtgtgtgtgtgtgtrtatatatatatatatatatatatatttccttttttttttgagacaagagtctctgtcgcccaggctggagtgcagtggcacgatctcggctaactgcagtcactgcctcctgggttcaaccgattctcctgcttaagcctcccaaatagctgggattacaggcacacgccaccatgcccagctaatttcatatttttagtagagatggggtttcgccatgttggccaggttgatctcgaactcctgacctcaggtgatcctcccacctcgccctcccaaagtgtggggattacaggcatgagccaccacgcccggcctgatatatatatttttaatgtgactgacatttggggaggagagaaagaagctctagtaaggtcccatagtattttatgtgaagctaatggggccaaatgcatttcaacattcagaatttttaggatattagaaagataataccatatataaaacacccagaaaagtctggagcagcaccttttagtaaaacacatttatatttctgcagcaaaagacagtattcatactaagtgagataattaaattctataaatagtttcatgtcacctcaagtcaggtttaaccctcaaatgagtttttggaactttttgggatttggaattgtggatgaggggttgtggtcctgcactgaagtttgtcaggcagtatctttagttgatagaataaaatggcagggagctagatgcttaaaagtgatttcaagatatttttaattgacaaagcagagtataattaatgacagcgtctctgggtttctaggatttgtactgtgttcgcagtgacctggggaacctgctcaaagccctgggtcgcttggaagaagccaaggtaggtgtttgatagaacacatttaaacatcagtattatgaaaacttgtactttttgccaagtsttcaactcttcattgagctatcttcacaaaacagtcctttgaaactgaggaaaactgacggcacgaatcgcctcagaatagagcagggccaggctttggcatatctgttctaaatctgggggtaaagcaagaacctgaacattttggagcctttctgctgagctagaccatctttataacactgggctccgtcatgatcttatgtgggaataaataacattccttcaaatctgaggcttgcctgctggtgacaagcagagcgcctgtgatttggctcaagactcctatatgatgcaggtgccattgaaaatgctgctcttctaagtcctttgtggcttgtaagtggagaagaatttcatccaaatgttaccctgtaatactggcatttaaaattcttatttaaccttcctcccttcatcttcctcaccctttttacagtggaagaaaggctgttaaaatgattacaaattaataattggaacatcctgtcccttgtccccactcccttcccaagttcctttttcctcttttccaatcctagttgtctaccttcttttcttcctcatttccttcttttattcctccccaccccaaccccttaaaaaaaaggtcagaaggacaaagctggtttgtttgggaaatggactgatcgaaagaaaacttgccaaagtggaaaggtggcttttagcattctgtgtttccaaataatgaatttgaacaccaggttgggttaattaaagcttttggtataatttaaaattaaatttataaatgcagttgtcttgttacaagccaccttacgcaaccgcgctgcaggggtgaggagtggggagaaaccagaatgcttctgaaactcccacctgttgctctgagccccacgcgcatgctaatgcgtggagtgtatgcgcagagtagctgtctgtttgactgcttcatccagggagggagaaggcttttcagcaccatctaatgttttaaaaggcactagttttaagtgcacagctcataaattctgctgacattttggattaaccttatgtaggttgccagctaatgaattgtaattgatttcaatcttagctgataaatctaattggtaatttatagaacaaatatttgataagctcctattaattgtcaccccaccaagcggacagctaacatgaattgcacttcactgcagctttagagatcggtttaggctgagacattgcgcctgccttaggttgctgacttctttatttcagagctctggagacacctagtttgaaaaatgttattctgtttttttgtgagaacttagtaaacaagaaaatactcttgagtgaaatgcaatgtatttcttttgtaatcagtgcatttgaaaattcaagccagcatattcctagtagatggaagcaaaattaagttgtctttgtagaaaatgaagagcctttcttccagcaaaaatccctgctgtatgmaatagccctgattaaccctctcccttctgcatgtttcccatattacagacttgagactgtcctcattcccatatgtaatagacatccaaagaatttcaattgctttgttgaacttttactaatgatcttgtttttattttctctcttgtttttggtttttcaccattgatattgtatttagaaggtttcaggtgggtgaaacctcctattccatgcgtaaggtgcctcgctgaagggagctcgaggcctggatctagggcagacacacaacctcctcctcctcttccagcaaggaacgcaccgaaaagtcacatgatgagaaatatggtaacgggtttgtaactgccacagcaaaacaatttgcctccatgcctgaatcttctgtcttgtggcttcagaaacagcttaaaataattttatttacaagcaagttatgtaagagaatgttttatactatagccacaattctgtcaaagataagtaaaagttaattgatattaaaaattattagagataatttacttagtaaaagcttctaactcttcttgttgttcattttttttccttttttcttctttgtttggattgcagcattctgctcttctgatgatgcgctgtgaccctgcagtagcgcaaaggctgcgcagcgttaatgcgcattgcgtgcgaatgaacccctgtgaacggttgactagatgagtaatctgattgactggctccctcagtcctattctgtagcctttttggataaaattgggttttaacatacctcgagtccaactaatctcattaaacaaatattctccatgggcctgtctagtagattaatggatctggttggccgtttgctgcgtctaggggtgttctatgtagcgcagcagttcgcagcgattgcgcagtgcgatgctgttaggttgcgcaagcgatgtttgcgctcgcattacagggacctcaacctaggtgcaatcctgtcatgtgaggtttcagcttcagtcctccttgggagacggggcattgtgagaatgtaacttaaagcctggctttatgatatcctacttggcagaaagacatttttctcctcagtagcatagttttgatgttagtgaggaacattgttgaagagcagcatttcccaaaatgtgtttcatagtattctaataaaatgcccaatgaaagaagagttccatggtcaactaagttcagggaaccctgttacactattaaaggcttagggaagtccagtaaagaaacctattttccgaatttatttgatcatgaactcctttttttttcagccatacctcttaacacctcatagaacacactttgggaaacagtgggggtaggaaaactcggcctcaagttgcgccctctaggtagcacttgaaaacatgacaagggcccgtagttgtttggataagagaactccagcatagagccttatagcaactgacttcccagttaagtcccagtgtaagggttggtctttggttggcagaactgaacatggtggtttgcacttgggttctggtggcgcaggcgcaggagcagccagctgtggcagcgcattagttttggcgcaagcgagcctatgctgcagggtcacttttggctggtcagagaaggaataatgatatcaccttcttccccccctccccccaatcttttttttttccctttacaaattttcccctttccctttacctcctttccctcccatcttctttcattaacccctcctaaggcatgttatttgaaagcaattgagacgcaaccgaactttgcagtagcttggagtaatcttggctgtgttttcaatgcacaaggggaaatttggcttgcaattcatcactttgaaaaggttagtcattaaattaataattggtatttttgaagtgcttaygcatgtagtgtttttactagaactaaataataggtcttagccagtgacattatatctttgtttctctggcggtataggcagtatgtgacttacagagaacaatgatttgacttaaatattttttcaacttgacaatggtgcaaaagacatacatattcaatagaaatcatacttcgagtacccatgcagccattctggttttccctttcagtacaagattcagtaaattacatgagatgcccaacacactattataaaataagaaggaggctgaggcaggaggatcacttgagcccaggagtttgaggctgcagtgagctgtgaccatgccactgtacttagcctgagtgacagagtgagaccctgtctctaagattaaaaaataaaaaggtaccataaagacacatgcatgcgtatgttcatcacttcacaatagcaaagacatggaatcaacctagatgcccatcaacggtgggctaaagaaaatgtacatatatgccatggaataccatgtagccatcaaaaatgaaatcatgtcctttgcagcaacatggatgcagctggagtttattatcttaagtgaattaatgcaggaacagaaaaccaaatattgcatgttctcacaagtgggagctaagcattgggtacacatggacacaaaggggaacaatagacagtggggcttacttgagggtggagggtgggaggagtgtgagggtacaaaaactacttaccaggtactatgttcactacctgagtgacaaaatcatttgtataccaaattgctgtgacacaatttacccatttaacaaacctgcatgtgtaccccaaacctaaaataaatgttggaattaaaataaaactcatattaaagttttaaaaaagggctttgtattaggtaattttacctaaacgtaggctaatgtgttctgagcatgtttaaaatgagactagccgggccaggtgtgatagctcacatctgtgatcccagtgctttgggaggccgaggcgggcagattgcttgagcttaggagttgaaaaccagcctggacaacataacgagaccctgtctctacaaaaatgagctgggtgtggcagtgtgctcctgtagtcccagccatttgtagggctgaggtgggaggattgcttgggcctgggagctggaggttgcagtgaaccaagattgcaccactgcactccagcctgggtgacaaagtgaggccctgtctcaaaaaaaaaaaaaaaaaaaaaaaaaaaattaggctaagctaggatgttcactaagtgttacagatgcattttgacttaagatattttcaacttatgatgggtgtatcgggacataaccccatcctaagttgagaaacatctttattgcagcatttgctggatagtacatggtatggcagtttccaattttgtgttgaaaatgtactttaggctgcgtgctgtggctcacacctgtaatccagcactttgcgaggctgaggtgggaggattgcttgagcctagtagtttgagaccagcctgggcaacatagtaagaccctgtctctacaaaaaatacaaaaagtagctatgcgtggtgacacacacacagctactggggaggctgagatgggagtttgagtctgcagtgagctgtgatcatgcaactgcactccagcctgggtgatggtgtgagaccctgtctcaaaaaaaatgtactttagtaattaaaaatgatttttataaatgggctttaaagaagcagggcttcttggtgaaaaggcagattccaggtctggggcaggaatttaaaaaaaatttttggaatgtcttgtcataccagaaagcaaggaagctttgacatattactttgcatcaaaaggactcaggaagcaacttgaggaggctcccactggctaaagatgcagacttgagcatcaataggaataataactgaaatatactaaaacttatcaagtatgtttaaatctatgagcttataattatgctaaaaaattcattggtcatctttggaagacttacaaggaacaattaatttggaaaactggttaaaaagagaagaataaagtttttgaggaacctctatactagttcccaaaatggctgtgccaatttatacttcccccatcagttacaaggcttccctttctttacatcctcactaacacttgttattattcgtccttttgatgatagctatactaacaagtgtgagatgctaactcatggttttattttgcatttccttgatgattagtgatgttgagcatattttttatatatctgcttgccatttgttttttttgttttgttttgttttgtttttttgagatgaggtcctgctctgttgcccaggctggagtgcagtggcgccataatagctcactgcaacctcgaactcctgggctcaagtgatcctcccaccttggtctccccaagtgataggattacagacatgagccactgtgtctggcctgtacctcttcttttgagaaatgtctgtttagatcctttgcccgtattttaatgggcgtatttgctactgagttgagcttcttaaccctttatcagttgtatagtttgcaaatgctttctcctaatccggggttgcctattcactctgtgtaattgtttcctttactgtgcagaagctttttagtttgatgcaatctcattgcatatttttgcttttgttatctgtgctttatgctaagtgaaataaaccaggcacagaaagtagatactgtattatgtcacctatttgtggaatctaaaaaagttgatttcatagaaacagagagtagaagggtggtgaggcttgggggggtggaggagggatggggaaaagggagatattgatcaaagtttcagttagactggaggaataagttttagtgatctgtagtactgcatggtgaccacagttgttaataatgtatatttcaaaattgcaaaaagaataggtttttaatgtcctcaaccacaaaaaaataagttagtgaggtgatggctatgttaattagcttggttgactctttctaaaatgtatacgtggatcaaaccatcacattgtatgccataaatatacacaattatatatcaactttaaatttaaaaattaaaagaataaagcatatgtcttccctctcctgtatgaactagaccatagagtaacccaatagttgatgggggaagcttttctttataaaagcattctagctaataagtgaagaaggaatgatagaatatcaccattaatagtgaaagcatttattaggccgggcttggtggctcacgcctgtaatcccagcacttcgggaggccatggcaggtggatcacctgaggtcaggagttcgagaccagcctggccaacatggcaaaaccccatctctactaaaaatacaaaaattagccaggcatggtagcaggagcctgtaatcccagctactcaggaggcggaggcaggagaatctcttgaacctgggaggtggaggttgcagtgagctgagattgcaccattgcattccagcctgggcgacagagcaagactccatctcaaaaaataaaaaaaaagttaaagcatttatcagtgacaaaaacgagatacaatcaggtattaagtaccttgtggtaaacaatttcaccagtgaagtagtcttgcacaaagagaaaagaacacaaacctaattaagcttctggttctacctaccaatttacaggagatatacacgggacaggaaacatgttaaaggacaccatagggatgcagtcagcaaaattcaaactttgggaagctgaccttcttacttcaacaaattgtaataaaaatggagatttaaattaaacttttaggccgggtgcggtagctcacccctgtaatctcagcactttgggaggctgaggcgagtggatcacttgaggtcaggagttcgagaccagcctggccaacatggtgcaaccccatctctactcaaaatacaaaagaaaaaaaaaacagctgggtgcggtgcggtggcgtgtgcctgtaatcccagctacttaggaggctgaggcaggagaattgcctgaacccgggaggaggaggaggttgcggtgagccaagatcgtgccactgcactccagcctgggcgacagagtgagtgacactccgtctccaaaaataaataatgagtgacactccgtctccaaaaataaataaataaacacacaaacttttaaaggattaaaagaaactcagagaggcacattgacaaattatatctgtcttatttggatcctgactcagttaatgagaaattggagcactgaatggatttttttttttttttttttgagacagggtctcacttgatcgcccaggctgaagtgcagtggtgtgatcttggctcactgcaaccttcacctcccaggctcaagggattcacttgcctcagcctccggagtaggtgggactacaggcgtgcgccatcatgcccggctagctttttgtatttttagtggagacagggctttgccatgttcccaggtcttgaactcctgagctcaggcagtctgcctgcctcggcctctcaaagtgctaggattacaggcatgagccaccacgcccagctgatatttaatatgaaggaattgctgtcttttttttttttttttctgttaggtatgataatggtattgtggttaggttgggaggaaaaagcattcttgtgttgtccctgagatacatattgaagtatttttgaatggaatatgtctgggctttgcttcaaaatgatctgcgaagagggggagtaagttggagtatagattaaataagatcaaacatgatatatgaattgttgaaaatggataatggagacttggacgtaatgttcctctgcttttgtatatgtttaaacatttctattataaagtttaaaagttcttggggtggacatctatcactatagacaatctaaattaaatgcatcatgccgtgtttactacagagttgtcatctaagtgaagatgaagtgttctttctttatttttttttgagacagagtctcgctctgtcgcccaggctggagtgcagtggcacgatctcagctcactgcagcttccgcctcccaggttcaagcaattctcctgcctcggcctcctgagtagctgggattacaggcgtgagccaccatgcccggctaattttttgtattttttagtagagacggggtttcgccatgttggccagggtggtcttgaactccgggcctcaagtgatctgcccgccttggcctcccaaagtgctgggattacaggcatgagccaccgcgcccagcagatgaagtgttctttatcagtctttaataaacatacaattactcagtgtcttaatcaaataccttttcggtgtgtgtgtttttttttgtttttgttttttgtttttggagacacagtcttgctctgttgcccaggctggagtgcagtggcgcaatcttggctcactgtaacctctgcctctcgggttcaagccattctcatgcctcagcctctcgagtagctgggactacagttgcacatcaccatgcccaggtaatttttgtatttttagtagagatggggtttcaccatgttggccaggctggtcttgaactcctgacctcaagtggtccgacctcggcctcccaaagtactgggattacatgtgtgagccactgcacctggccggtgttttgattgaagtttgcatttaccatgctgtaggagtatctttcttgatcagtgtttctcttccttggttatacatgaggagcttataaaagatctgaatatcctgaccctatcttcagagggtctgatttaactggcctgtgatagagcctcggtaccttttctaggaggtaaattcttaatatattgccaaggttgagaatcactgctctagacaacatgacagctatttggatgacaccgtgtaatggttagtatttccttgaagtattgtatcttactgtgtatacagctctaattgcatgtcttaataaggtcttgctgagcatgtagtttgtatgcatacaactgaggtatatatttaccttttcagtaagagtttgctgcctcttttgccactatttttcagaagagttagactggttaattgtgaataaaatagggccaatcattagaagtgttcagtttaatgaaattggagcaggcccaatatttaatttttctcttcaggacccattttgctcatgagaacatgaggcatgagaagttattttgataatgttgaggtttgtaaaaataatgagaagacactaaataaataattggtttattaaaatgaaatgtaattgaaagtctgcaaggaccttggagtaaaaaaattgtaattgggaagttgatctggtgaaatcctaacttgctctgagtaactaactgtcttgaaatttttaggctgtcacccttgacccaaactttctggatgcttatatcaatttaggaaatgtcttgaaagaggcacgcatttttgacaggtgagagaatgttctgtttaataaattttcttgaatctttgttgtattgacacttgacagtttggaccgaaatgatgacaatagtccattgaagcatatttgccttttctagcacgttgttctctgcccatgtcctgtgttgccttttatttatagatgttgttcgttgcctgactttttgttgttggctttcctcaaagccgttatccttctcattgggagtttagttgaaatttttttattgttaaaatggttgaaatgattctttcttagactaaattattcctttgacctgattttagaaagcaaagtaaatccagacttttaaattttttgttgttgtcaaaggaaagcctattttttatgtgggagtagaaaacttcccagtgtaaagacacattttataaaggtgtgattttggtttgaggttaaaatataatacagcatgaattatgtaattaattacaattacttgatatattttgatatagtacagcttgaatgagttgtaacaaaccatccattaagcatgagttacattttgtgtgtgtgtgtgtgtgtgtgtgtgtgtgtgtgtgtgtgtgtgtttatttacagagctgtggcagcttatcttcgtgccctaagtttgagtccaaatcacgcagtggtgcacggcaacctggcttgtgtatactatgagcaaggcctgatagatctggcaatagacacctacaggcgggctatcgaactacaaccacatttccctgatgcttactgcaacctagccaatgctctcaaagagaagggcagtgtaaggatttttactcattctatttgttatctggtaggattaagagtcttttctggccaggtgtggtggctcacacttgtaatgccagcacttcgggaggccgagatcagaggattgcttgagcttagggtttcgagaccagcctaggcaacatgacgaaaccctgtctctacaagaaatacaaaaattagccgggcatggtggcacacacctgtagtcccagctccttgggaggccgaggtgggaggatcgattgagtcctgggaggttgaggctgcagtgggccatgattgtgccacagcactccagcctgggcaacagagcacgagactctgtctcaaaaaaatcacaaaaaccaaaaaacagcaaaaaaggaaagtcttttgtacaagtattgagatggtatattggtttactttagagttttggttgagggtaagaataccaaaaaatatcaattttctgtagcattaccagccattaggcttaattaaacaattattagaacagtatcagtggaggctttatgattctgtacagtttttgaagactttgttttgttttctaggttgctgaagcagaagattgttataatacagctctccgtctgtgtcccacccatgcagactctctgaataacctagccaatatcaaacgagaacagggaaacattgaagaggcagttcgcttgtatcgtaaagcattagaagtatgtgagggtggtgtagctgggcatttagcatgatagtagagggaaagcagttaagtttaccatcatccacctcttttgtaaaaatagtggttgaatcatttacaagaggattattcattgaagtaacaattgagtacctaaggtatgatgtgaggccctatgtgacattccagaaaatccctgcattcagagttcattattctgtggataagatctgtacaaaaaaattaaacattaacccacagttcaagagaagttacttataagtatataatcttagtgcctgatggctgtatggtagtggttagtagatgtggtaggagtttagcagagagagatttcagtggtgttggagtggtcaggataaactaagaggagaagaggtgtacctcattatgtttgaaacaagaagaggtataaaatagaggaagaggtagaatttgagaatgaatagacttggaaaaagtagagacaaatttaggggtttaaatgtacttgagcaaagttcttaaggttgtggtgaattattactgctgctttagcaatttttttaacctcagttctgatcttgactctttataggtcttcccagagtttgctgctgcccattcaaatttagcaagtgtactgcagcagcagggaaaactgcaggaagctctgatgcattataaggaggctattcggtaagakacactaacagccttatttttaaaattatttttaattttaaaatgtttgacattcggcacattgcagatgctaaaatggctttaaataacaacrgaataagttagcattacagtgggttaaagatttttgtattggagaaataaaacctttggcttctcttttagaatcagtcctacctttgctgatgcctactctaatatgggaaacactctaaaggagatgcaggatgttcagggagccttgcagtgttatacgcgtgccatccaaattaatcctgcmtttgcagatgcacatagcaatctggcttccattcataaggtactactgtttattataatatgtgcagtttaacacctaaaatttaacttttggaaattttttaccatcctgctttatttattttccaggattcagggaatattccagaagccatagcttcttaccgcacggctctgaaacttaagcctgattttcctgatgcttattgtaacttggctcattgcctgcaggtaaagaataacaggccagtaattggctctcagtgttgtaatagctttttaattgttgtatgccataagaatccaagcctgactggaaatagtatttttaataggctatctgacattactttaggccaaagacatatcaaatattaaatcctgggataggactttctggataataacttgtttttgctttctctagattgtctgtgattggacagactatgatgagcgaatgaagaagttggtcagtattgtggctgaccagttagagaagaataggttgccttctgtrcatcctcatcatagtatgctatatcctctttctcatggcttcaggaaggctattgctgagaggcacggcaacctgtgcttagataaggtgtgattcttttgttttaatctttttgttgtaaactaaaacacaaatacagaaaactgtaaaaatcaaatctgtggcttaatgaacgattataaagtgaacaccacccaagtcgagaaataaaacttttgtgggccacttcagaaccccttccattgtgtcctgagtataaccccctgcacttcataagacggaatccttaactccttcacttaaacactaatgatagactgatggtacttttctttaagttgaaagccataatttttttttcttttatcttttttttcttttttttttgagacggggtcttgctctgtcgcccaggctggagtgcagcggtgtgatcatggcttactgcagccttgacctccccgagcttaggtgatcctcccacctcagcctcctgagtagctgggactacaggcgcatgccaccacacctaattttgtgttttttgtagagatggggttttgctatgttgcccaagctggtcttgaacctctgggctcaagtgatctgcccacctcgcccggccaaagtgctgggattacgggtgtgagccaccgcgcctggccagccatcatgtttaatggagtgcttggtattttgtattcacctttgagaattagagcagtacttgatcaaggattggatcaaaggttggataatagattggagtgctaggtgtactttttttttttttttgagacatagtgtctctgtcatccagactgcagtgcagtggtgccatctcagctcattgcaacctctgtctcccaggttaaagtgatgctcgtgccttagcttcccgaggagctaggattacaggcgtgtgccaccacgcctggctaatttttgtatttttagtagagatagggctttgccatgctaggctggtctcgaaatcctgacctcaggtgatccacctgcctcagcctcccaaagtgctgggattacaggcatgagccactgcccccagccataattttgtttttagaaaatgtttccctatagaattttytaaaatgcgggaggaaaccatgctctgtccatactgcttcatacctacaagtgttagatttgctcgtacttttttttttttttttttttttttttgagacagggtcttgctctgttgcccaggctggagtgcagtggcacaaccttggcttactgcaacctccacctcccaggtttgggcgattctcccacctcagcctcccaggtagctgggactacaagcatgtgccaccacgcccagctaattttttttttttttttttttttagtagagattggatttcactgtgttggccaggctggtctcgaactcctgacctcaagcgatccacctccttggcttcccagagcgctgggatttgctcatgctttatagatctcaggagcaggtcaaagtatgaagcatattacataaagtgctgaggttgcatctctctggcaatattaactaaatgctctgggcagacctttttcaacaggtgtgaggtataggtttggtgtgtttttcgtcagttttcctagatgaaaatttatgtagattttactaacaagcattggattctgttgatagattaatgttcttcataaaccaccatatgaacatccaaaagacttgaagctcagtgatggtcggctgcgtgtaggatatgtgagttccgactttgggaatcatcctacttctcaccttatgcagtctattccaggcatgcacaatcctgataaatttgaggtaagactagtgtttctctasaatcactatttgtttaaaaaagaaaaaacccacaatgttggcttgtcaccatgaggcatggaaacctagtgtcttttggaaagatttgagccagaaagatttgagccaatgttattaaatatgccatgtgctgcctttcaggtgttctgttatgccctgagcccagacgatggcacaaacttccgagtgaaggtgatggcagaagccaatcatttcattgatctttctcaggtagatgaaactctcatactttaactttttattttgagcaagtttaaataaaactattagcatatagtttatttttgatgataagtattaaatgctgtagtaccacatataggcaattgtgttgatcttatttccttgatcatttgtgttaatcagcatggctttttccgaggttgcaaatgaaactgaaatgtgttatgcttgtgcttggacatacaacttttctggagattgagccagcacttgtgacagaagatacttaataaatattgacaaaatggtgacttgggagaagaataaataggtcttttaaagaaaatagggccgggtgtggtgactcatgcctgtaatcccagcactttgggaggtcgaggcgggcagatcatgaggtcaggagatgagaccatcttgactaacatggtgaaaccccgtctctactaaaatacaaaaaattagctgggtgtggtggtgcattcctgtaatccccgctacttgggaggctgaggcaggggaatcgcttgaacccgggaggcggaggttgcagtaagctgagatcgcaccactgcactccagcctggcaagagcaagactctgtctcaaaaaaaaaaaaaaaaaaagaaaaaatagatgaactatggttcatcagtttccatgggcctttgcctttggttatctttatttctgtacttgttctattgttgtatcctctaggagagtaagttttatgataaattaagattgaaacctatgggggaattaatttgctgagtatgtaggctacagtgttttctttgtagactctattagccactttgactaatagagataatatactctttatatgtgtgtgtacacacatgtatgtatgtacatacacatgcaggtatgatatgtatgcatatatgtataaatatacatgtgtatgtgtatatatatatgaatcactgaagtcctagcagaaaggttttgagacttctcatttaataaatagtatgtactaacaaattttgcagtatagctgttgcttcaaaagtatacctggccatttttgatacacagttggactctttgtgaccaagaagcatacctctttctacctctgagacctttagggactcactgctgattgattgcagtctaaactcttcagcatagcttttgtaacctttctctgtttgccacaactttgtcaatactttaactcaccattcaacatcttgtataccctatactaaatagaagtgaattactcaccctttttttttttgagatggagttttgctcttgtcgcccagggtggaatgcagtggcacgatctcggctcactgcaatctttgcctcccaggttcaagcgattctcttgcctcagcctcccgagtagctgggattacaggcgcctgccaccacacccggctaatttttgtatttttagtagagacggggtctcaccacattggccaggctggtctcgaactcctgacctcaggtgatccacctgcctcggcctcccaaagggctgggattacagatgtgagccaccatgcccggcctactcaccattttctaaactccctcacactttactctagttcttcattcatactgttctctactgagattgtattctgttaaactccttcaaactcctattcgtctttgaagacctattttcaaataccaattctaggctgggtgctgtggctcacgtgtataatcctttgggaggctgaggtggaaggattgcttgagaccatcatgggcaacatagtgagaccccatccctaccaaaaaaaaaaaaaagattacaaatttcaaataccaatttctctgtgatatgttgttattcatacattcaatccagaagtgaactctccttcctttgtgttctgtttctttaatgctttgggcccattttaatgacagtcaaccatatttgtgcccgaattaatgtagttaatttgtgttcttacctcttttccatctgggaatctgaattatgttaaatgccattaaaactaaatgccattaaaactaaatgtcattaaaactaattgatctgagattatacatagtgagttcttattttgtattctgtagattccatgcaatggaaaagcagctgatcgcatccatcaggatggaattcatatccttgtaaatatgaatggctatactaagggcgctcgaaatgagctttttgctctcaggccagctcctattcaggtaaacaaattaacagtcatcacttataacatgtatttggctaagaatacagtgaggtgctgcttttcctccctctggttaactgatatttgaaactgtagggcagacatacttttaatttttttaagttgttgaaatgcacaggacaaaaagagtgtagagcacagtgcttataggtacatgtatatagagacatgcaattcatggttggctatgaacagttactctgtcttgcaaatttgaagaacattttagcattttgaaagttagtctgaaatacaggccgggtatggtggctcacgcctgtaatcccagcactttgggatgcttaggcaggaggatctcttgaaaccaggagtttgagtcctgcctgggcaacaaagcaaaacaccctatctctacaaaaaattaaaaaattagccagagtggtggtgtgcctctgtgatcccagctatttgggaggctaaggtggaaggattgcttaagcttaggagtttgaggctgcagtgaactatcactatgccactgcactccagcccaggtgacagagtaagagtctctcttatagaactgcttcattgctttcggctaaagaagtcagccttgctgtgcgtgtggcaagtgcctgtaatcctggctactctggaggctgaggcagaaggattgcttgagcccaggagtttgaggctgtagtgatctacgattgcaccactgtattccagcctagggaacagagtgagatcctgtctctaaaaaagagttagacctccttgtttatttacttatttaattttggcacctttaggttctttttttaaaaaccactttattgaggtacagttgacatacaaaaagttgtacatatttaatgtatgtgacttgatgaatttagaggtaagtgtactgataaaagttcttaatcagtttttgatctgatttttttaaggcaatgtggctgggataccctgggacgagtggtgcgcttttcatggattatattatcactgatcaggaaacttcgccagctgaagttgctgagcagtattccgagaaattggcttatatgccccacactttttttattggtgatcatgctaatatgttccctcacctgaaggtaggtatgaaacagtgctatggacgaatttcaaagaactgtagctttttatttccttgctattgtctatgtaaatcctaaaagacatgtctgaaactattttttccattagaaaaaagcagtcatcgattttaagtccaatgggcacatttatgacaatcggatagttctgaatggcatcgacctcaaagcatttcttgatagtctaccagatgtgaaaattgtcaaggtcagaacctagtcagtattgtcattgaaataaagttaactgcattcaygatcttttccctaatgatgcatttttttttcagatgaagtgtcctgatggaggagacaatgcagatagcagtaacacagctcttaatatgcctgttattcctatgaatactattgcagaagcagttattgaaatgattaaccgaggacagattcaaataacaattaatggattcagtattagcaatggactggcaactactcaggtgagaagataataatacaccattatatgtcccgccaagtatgcatttatttcccttaacctcatgataactctaggaggcaagtatcattatcaccatttttatggatgaggaaatgagtttagtggaaacgtgcatcttatataggtgtgtctgattttaaaagtctcctggattcagccagcagattattacttactgagaaactgctgtgttaatatcttgttattccctgcctgtggctttactctcttacatgatgaactatgtgtagattccatacagtttcttgcttctgtaaacccatcctttccctagctaaatcctactcaaacgttcagttcagacagctcttccaggaatccatttccgtacttaccgctaacgtctccatccctacttcattggtacctgtcttttatacctctgtaatgtttggaatatatcattacatacagcacaacagatgataattccctgtgtttgtatcctctactgaattgaattactgagcccatgtcttaatcacagtaatgtagtatgtactcaataaataatatattgcatgcttaaataagtagctctatcaagagagtgtaaggcaaagatctctgacctctagaggtcatagatgtccttgcacacctggaatagttatataacaatgtaaggcagtactcaaatgtgtgagaattacaagatgaaactaattatgtatgtagaagctcagaaacggtgaggatcaatgtgaagagagacactcttgggagaagagaccatttggaggagtaatttagccttgaagagtagatgtgatttagaaaaggacatttcattcatgaagaaaagagtgatcaaaagctgttggaacgttaataggattttgagaccttttttggttagagcaagaagtttcatagtgcagtctcccccaacttaagataatgctgcaacggtttgccttttcttaaacttcatatatcatgaatattttctcatggttcagtgacttttaatggttataccattttggatcttatggattgaaatattggactccttttgcctttaaatataaccatcatttttttcttgttctagatcaacaataaggctgcaactggagaggaggttccccgtaccattattgtaaccacccgttctcagtacgggttaccagaagatgccatcgtatactgtaactttaatcagttgtataaaattgacccttctactttgcagatgtgggcaaacgtgagtatgcaagtatgttagagactaataaagattttgtatctagagcttcttgctgaagatggtccttccactcccatttaggagctgttctgctcatttctttttaaaatttttttttggctgggtgcagtggctcacgcctgtaatcccagcactttgggaggctgatgcgggtggatcacctgaggtcaggagcttgagaccagcctgaccaacattgcaaaaccccgtctctattaaaaataccaaaaaattagccggacatggtggtaggcacctgtaatcccagctactcgggaggctgagacaggagaatcacttgaacccgggaggtggaggttgcagtgagccaagatcgtgccattgcactccagactgggcaacaagagcaaacctccatctcaaaaaaattttttttaaaaatactttttaaaaaatttattttatttatttacatgtgactcaactgggttatgccctttttttaaaaaacagaatctcactctgttgttcgggctgcagtgtagtggtgtgatcttggctcatggcaacctttgcatcccaggttcgagttattcttgtgcctcagccttccaagtagctgggattacaggcatgtgccaccatgtctgggtaatttttttttgtatttttagtagacggggtttcaccatgttggctaggctggcctccaactcctggcctcaagagatctgcccgccttggcctcccaaaatgctaggatgacatgtgtgagccaccgcacctggccttgtgctcatttataatcttcaagagatgtagatttttcaggcatttttggtttctccttccagtgtctaaatatgacattgtgaaccttttaaatttacatattcaaagcattcttctgtctaaagggtcagcaaactttttcttaaagggccagatggtaaatattttcagttttgtggtccatgctgtttcacgtctactcagctttgccgttgtagcacgaaaataaccataggcattttgtaaatgatgagtgtggctgtgttccaataaaattttatttatacgaactggcagtatgccagatttggctcacaggctgtgtagttcgccaactcctggtctaaactgatagcatatgctgtcatgtacatccacccatttttaacattcttgtagtattgtagagttataaccaagaaggagtcgatctgtacatatgattatctctcagttcatcagacaagtttgcataagtgggatatcggatagctataactggctcttaatccatagaactaaaataaaatggcatgttttacctttaggtaatctggagataattccttggttaattttttccccgatatctgttttgttttatgtttagaggagaggggaggatagaagagaagaggaagcagatgagtacaggtctactgtccttaatccttacttcctgatgttcacaaaaactctgaaaatcaaaagctttttcataagtgtgtggcaaatttgtttggcagcaaaactacctgaactaacattagggtatatattagtccgttttcatgctgctataaaggactgcccgagactgggtaatttataaaggaaagaggtttaattgactcacagttccgcgtggctatggaggcctcaggaaacttagagttacggcggaaaagggagcaaacatgtccttcttcgcgtgatggcaggaagaagggctgagccaaagcggggaaagccccttataaagccatccgatcttgtgagaactcactctctatcacaagaacagcagcattggaaataactgtccatgattcaattacctaccactgggtccctcccatgacacatggggcttatgggaactgcagttcaagaagagagatttgggtgggggacacagtcaaactatgtcagggtatttgtagtcttttatttatttcatttagtatgactgttcctgcatctcaatgcagaggtactaatatgtttataggaagttgctgctgagggtgttaatgtgatacatacacacacagtactacttttttaaaatctgaaatattctgaatttggaaattcatctgttctcatagctttcagagaaagggattttgaacttacatggtacatagagtagatgtaaatctaaatcaggagttggcaaactatgacctgtgggtcaaatccagcccactgcttgtttttgtaaataaaacttaatggacacatagctatgcctacttgtttacacattgtctgtggctgctttcaagctacagcagaagaactgagcagctatgacagtccrtgtggccacagaaccaaaaatatttgctatctggccctttacagaaaagaccgatttatattaggcaaagaaagttaggcaagtgtgaggtaactttcttggttgtatcatagtgggggatttgaaatttggaatgcaaaattcctctctcagcaaaacccactgcctgtgtcaattcccgcaggaggtagctgcctcagattttgcctgtctttctttgaactcactttgaggacagctaagcagaagagggataattcaattgatctcattcatctctgtgaaggaaagacttaagtccacagcaggcttctatctggatggaaagaatagagtgtggtagaattattagagacctctgggagtctttgttgaaaaaggcagatctgctattaataattattcttattttccctattttagattctgaagcgtgttcccaatagtgtactctggctgttgcgttttccagcagtaggagaacctaatattcaacagtatgcacaaaacatgggcctgccccagaaccgtatcattttttcacctgttgctcctaaagaggaacacgtcaggagaggccagctggctgatgtctgcttggacactccactctgtaatgggcacaccacagggatggatgtcctctgggcagggacccccatggtgactatgccaggtaagttgctgataaatcactggaatcttccttgttcctttgaaaatctccgtttgggggagaaacttccaggtgaaattatatgtactaggagcaacattaaaggaaaggtgatagaaagtgagacttgttctcacttcattctcttcatctgcgttgtgtggaggcttaacataaataacattaactctgtgctgttttacgttctcagatgtgcagttgttatcttttgtattacaggagagactcttgcttctcgagttgcagcatcccagctcacttgcttaggttgtcttgagcttattgctaaaaacagacaagaatatgaagacatagctgtgaagctgggaactgatctagaatagtaagtaaacttttccttgaacaaattatttggtaaagtagagagaatatagctgttataaaatgaaaccataaaataagtgtaatataaaataggtgaactagttgtatgccctctggatgggagaagtacttctaaactcttagaaatgaagtgatcaataggttttactatgtaaaaagtaaatggctgaataaaaaatattcaagaaaattaaaaagcaaacgaggggaaaaaatcttttgtctcagataacaaagtattaattacctggcaatgtaaagactgcagaacatttaaattttataatcccctaataggaaagtaaaaatggaaatgaccagacacctcactgaagtggaaatacaaaaggttaacaagaaagtgtttcaggctctgtagtagaaatgccaattaaaatggaattgaggctgggtgtggtggcttatgcctgtaatctcagcactttgggaggcttaggcgggcggatcacttgagatcaggagttcgagaccagcctggccaacatggtgaaaccctgtttctactaaaaatacaaaaattagttgggtgtggtggcatgtgcctgtagtcccagctactcaggaggctgaggcaggagaatcgcttgaacccgggaggcagaggttgcagtgagccgagatcgcaccattgcactccagcctgggtgacatagtgagactctatctcaaaaacaaaaacaaaaacaaaaacaaacaaacaaaaaaaaaaccaaacaaacaaaaaaaaccaaaaaaagaacctgaggtatatccattatttgcctatacaataaaaagattttttgtatcagtgaggtagcattgaggactagcctttttatgcattggtgaataaattggtacagcccttcctcagagtttttagagccttaaaagttagatctttgggccaggtgcggtggctcacgcctgtaatcccagcactttgggagggcgaggtgggcggatcacgaggtcaggagatggagaccatcctggctaacacggtgaaacccccctctactaaaaatacaaaaaattagccaggcatggtggcgggcgtctgtagtcccagctacttgggaggctgaggcaggagaatggcatgagcccaggagacggagcttgcagtgagctgagattgcgtcactgcactccagcctgggcaacagagcgagactctgtctcaaaagaaaaagttagatctttgaccctaatactgtcacttcttcactacggtcggtgtaagaaataaacaaagcataacttaaatgcctgaaaatgagtaggaattagaggggtgatgcttagatgaggaggatttatccatacaataaactagtatttctttcattcttttattttttttgagataggattttactctgttgcctaggttggaatgcagtggggtgatcttggctcactgcagcctccacgtcctgggctcaggtgatcctcccacctcagccacctgagtagcagggaccataggactataggtacatgccaccatgtcccatgcctggctaatttttaaatttttttgtagagattaagtttcaatatgttgcccaggctggatatttcttttttcttttccttttttttttctggacggagtctcgctctgtcgcccaggctggagtgcagtggcgcgatctcggctcactgcaacctccacctcccgggttcaagcaattctcctgcttcagcctcccgagtagctgggactacaggtgcacgccaccacgcccggctaatttttgtatttttagtagagacggggtttcaccatgttggccaggctggtcttgaactcctgacctcgtgatccacccaccttggcctcccaaagtgctgcgattacaggagtgagccactgtgcctggcgttttttttttttttttttttttttttggagacagcctcgcactgttgcccgggctgaagtgcaatggcacgatctcggctcactgcaacctctgcctcccgggttcaagcgattctcctgcctcagcctcctgagtagctgggattacaggcatccaccaccacatccagctaatttttgtatttttagtggaggctggatttcactatgctggccaggctggtctcgaactcctgacctcgtgatccacccaccttggcctcccaaagtgctgggattacaggcataagccaccgtgcctgacgggtatttcttaaatgaggtttttctttcggtataatgggtgatgttttttctttgtgtttttctgagaagtagcatattacataataattaaagaaacatactttttgagtcagactacctgagtgaacccaagctctcctacttatgagttttgagactttgggcaaataaatctctgtgttgtgccttggtttcttcttctgcaaaatggagcataatgctagtgcctactttgcagagatgatgtgaggattaaaaaaggcattccatgtaaagtacttagaatagttgttggtatctggtaaacattcagcagatgttagctacttattattttcagaatttcctccatagaacatcacatacgtctaagaaaagtgagaaatttgaacccaggcattaaaaaaaaaataagattcatgtccattagcccagagataactatagtaaaaaatgtagtgcgttttattttcagacagggtctcactctgttaactcaggctggagtgcagtggcatgatcacggctcactgcaacctctgcctcctgggatcgagtgatcctcccaccttagccttccagtagctgggactacaggcacatgccaccatgcctggcttttttttttttttaatttaatattttgtggagacagggtctcaccaatattgcccaggctggtaactcctgggcccaagcagtccacccacctcggcctcccaaagtggcgggattacaggcgcgtgagacactgcacccagcctgtggtgcattttaaaatttttattagactctttggtacttagtttggttcatacaatgcttttcctcaacatttttgttctcaaaatttttaattttataataaacacatctatacctactgcttagaatctaccattagcattttactattcttgctttattacatatctattcatccatttattccctttattcatctgccaatccatcttattggacacattttgaaataaattgcagacatcagtacacttctccttaaatacttaagattggctgtcattaactggagttcagtacacatatatttttttgaggtagggtctccctctgtttcccaggctggagtacagtgatacgatctccgctcactgcaacttccgcctcccgggctcaagcagtcttcccctcaaactcctgaatagctggaaatacaagcatgagccaccacacctagctaatttttgtatttttagtagaggcagggttttggcaggttgcccaggctggtctcaaactcctgacctcaagtgatccacctgccttggcctcctgaagtgttgggattacaggcgtgagccactgcgcctggccatttttttcttttgaggcggaagttatatacagtgaaatacacaaatattcagtgagttttgagaaataacccttttttttttcgttttgaaacggagtcttgctctgtcgcccaagttggagtgcagtggtgtgatcttggctcactgcagcctctgcctcctgggttcaagcgattctcctgcctcagcctcttgagtagctgggactacaggcacgtaccaccacacccggctaatttttcatatttttagtagagatggggtttcaccgtgttagccaggatggtcttgatctcctgaccttgtgatccacctgcctcggcctcccaaagtgctgggattacaggtgtgagccacagtgcccaaccgagaaatacctttgtaacccaaattcctatgaagacaaaaaacattatcactccagagagtttcttcatgctccttatcagtcagtctttttcaccaacccccagagacaaccactgttctggagggtttttttcccttccataaattagttttgcttttctagaattttatccaaatggaactatgtcaatatgcactctaaaggcttctttcatcaagtttatttcttttgctgagtagtatttcactgtatgaatgcactacagtttattttcctattggcatagaattttaaaaaaatagagtgcacaggtctttctctttggagggtagcattaatatggacatggttgtattgagaccaacagatatgcacaaccattttactgcttctgtcacaacaaacattaaaacaaagttgggcgtggtggcgcatgcctataatcccggcgctttaagaggctgagggaggaggattgcttgagcccaggagttcgagaccagcctggacaacatggcgagaccccatctctacaaaaaatacaaaaatagctgagtgtggtgatgcgtgcctgtagtctcagcttcccgggaggctggggcaggaggattgcttgagctaaggaggttcagtctgcagtgagccatcatcgttccattgcactccagcctgggcaacagagtgagactctatttcaaaaattaaaagaaaataaataaaaattattgcttttaaaaatgcacagaaatgttctggcttctggttctaaagtatttatcccttcatctaagaataatctcatgaaaaatatattcaaaagggaagtagaaatcttttcccctgtgtttcctgaagaatcaattacttcttttttatttttctgaacagaaccatactcttggtgatattagcaatttttaaaaatctgaactcagttcaggtacaagtggaaaattacgagagtagacttattgtatttcttttccccttgagtggttttctgtttcatcaaaatgaccataaatcgaatacttcatcttatgtttatgctttaacttttgtaaatgatgcttcaatgaatatctttgcatggtcctgtatgtttttgcatctgattatttctttttaatagattttaaagtgttactgttaggccagagggttatgaacatttaaggttaatacatacttgctaaattgcttaccaaaaaggtaagcaacagtacataggaatagtcatgtgccgttgtcaattcttgttattttaaaggtagaaacaagacgaaatggagaacgcgtggtatcccttggatatacttgtttaggaaagaactaagttttttcagagtatatggagttgagctcatttcagtgttagcattatgcaagatgtgacccttccctttttagcacgaagccaatcaagaaatgagatagcgtagagtttggtcatgcattttttgccacaaatgcgactaggtatttatagggtgtgtttctgagtttctgctctgatttgtaaactgggttcttgttttttattacccagcctgaagaaagttcgtggcaaagtctggaagcaaagaatatctagccctctgttcaacaccaaacaatacacaatggaactagagcggctctatctacagatgtgggagcattatgcagctggcaacaaacctgaccacatgattaagcctgttgaagtcactgagtcagcataaataaagactgcacaggagaattacccctatacctgagcctcaaccttctgggggaaagggaactagataacatacttcttacttgtctgtacagtaccttgttgcagatgggtgatatataatggtaatagaatagcacagccagacttgcttcctgcatggtagggagagacacaaaagatgggaaactgcttttccacaaggaatctccgtagaattttgcggcgaccagatggtgcataggtctggaaggtctgatctcccttggtcttccatgggatggttagtgtggaggggagatatagattgtccggccgctttgtgattccatggattgattcagtcttctggatttttttttctttatattttgggtactggagcttttaaaaatgtttggtttcaggtatttttattcatgtgaagtgtatatgattctcttgagataaggttttaagctaaaatgttactccctgttttagtttctgaactctgacagattgacagggactttgctggtgtagtctttttataggttttataaaccacttgagcctatatcagtcgttttagtgtctgacctaatatttggagctatcagtgctttgttgatttagatgatgactcaagattttttctggtccatttcccatttccttttcttccctgacccccataccctcacccttaaaattctcctgtaactcaactaacaaaatcaagcctgattcaaaacatcctagggtgttttaaacacaccatctggtgccaaatgaagatttttaggagtgattactaattatcaagggcacagttgtggtactgtcattgataataatatagtttttttttttttcctaattttgacctgtttcaccagtgttttacccttgactgccccttctatgctgcttccaaaagtgatagtgtgtgtaagatttttaccttcctttctaaagttttttttttttttttttaagtgagtcctgttcttcctatttctttcagcagaaatgaaatcccaggtaagtataagtattcaagtatttgatcagtaagtcacagttatctccagtgcattaaataaccttcatcaagaaataggttataggtaaaatctctgaaggatcatctatgtattcaagtaattattttttagataataactgtcttctggacttggtcttgaagtctgtacagattcagcctcagtagtagcgaactgcactgctgtttggtttggagtacaaattagacttatagtcctcctggaacttgagttattaaaatcataggaataaaattatgggatctcaacaaagggtcgagggtttgaggcttaaacaagccaacatatgaatatatgttttgtctcgctatactgcacttacgctatccagttgcaggtaattttttgtctgctagtagtgttctagattatgtctttccaaagcgctgaggctgtgcacctattctgtagttgcagctgatgcctgaatgtatcctagctgacaaattattgattaataagaacttgaatttctggaagattcttactgttaaccaaattttgagcaaggagtctcaaaggtaattctgaaccagaattacatgttaatgaacagtgtaccttttaacagtgtaaatcacggaatatccgtgaagggatttcttaatttattttttaccggttgattgaaatatcagttaaaggttgccagcatggttgcagataaactgatgtttgaaattcgctgaaatacttaatgtggaataggataatatacttccaatgccctcaaggctgtgaccttacagccattttacatagcacatcattcctcctatagggatgaactttttcctggcacgaaaagtagccgctctggttgaagctttgcttattgtaacaggcttttatttccaggtaatatgtcttggaagacttaattctgattagagatatagatattactggaaactaattgttttttttctattgtactctgctttatcaaagaagtaaaacatttaaatcgtactacagaaattaagatgttgtcttgcgatccttaataaatgaatgatttccctttaatacggctgatgtattttgtatcctgttatattgagtgttggactgaagaatagtgtcatccaatgatgaaacctatatttaaacacctccaaacagcatgaaaggaccaaatttccctactgtagctatgatattaggaattgttttctcagccaggtctggtagagggtggggttagtttatgatccattaagaaggcaaagtggccttgtgtggtggctcacgcctgtaaccccagcactttgggaggcggaggcaggtggatcacttgaggtcaggagttcaagaccagcctggctaacatggtgaaaccctgtctctactaaaaatacaaaaaaactagccgggagtggtggcacacgcttgtaatcccaactacatgcgaggctgagacaggagaatcgcttgaacccgggaggcagaggttgcagtgagctgagatcgtgccattgcattccagcctggacaacagagtgagatgtcatctcaaaaaaaaaaaaagacaaagcctgtgatccccaacacacccattcatgcttgctcctcttttgcttgtgacctctctgctttcatttacccttgtagtctcggttttcatgtggaccattcttttcttggctcttgggggcaaaattattttccttcctgctctgtatagtggtcgaactctgccacaagcatcagggaggaagatatcaattcatgattgatatcatgaattgatatcatggcaaatgctgtttgccagttttctcagatatgagagggaagatttttttcagtaaaattttgcatgatttaattcccaacttcttaaagccctcatgtggattggtgtttgtttcctaaaagattattatgggaagaaagcctactcaaaagtttttactcccattcgcttctcttgaaaaatctacattatttccagtctacttcagctcctcctgccttcaatctaaaggagttgcttgcacaccttgagtaaatgtgtgtaatttctgaactgcccattttaagatttgattccaaacctatcccattcttttacttgaagcatatgcctctcaattatagctaacatcctggttctttgcccaagcctctgaggcacagttatgtaatccccattcttataaagaggcttgtagaggttaatttgcaacttcattgtagagagagagagtaatcagccccctttatccaatttttttatcaactgagaaagtatctgtatttaggtaggcaatctggtgcttaagagcaggttttggaactagagttggagtttgaatctcagctctgccacttttttttttttttttgagatggagtctcgccctgtccccatgctggagtgcaatggcacgatctcggctcactgcaacctccgcctcccaggttccagcgattctcctgcctcagcctcccgagtagctgggattacaggcgcgggccaccacacgcggctatttttttttttttatctttagtagagacggggtttcaccatgttgaccaggctggtctcaagctcctgacttcgtgatccacccgcctcagcctcccaaagtgctggggttacaggcgtgagccactgtgcccggccagctctgccactttctagctgtgtgatctctaaaatgagagtgctaacagttgcctactttttaaagtgttgtatgaattaagtcgtaagacacttggaataatgcttagcacaaaatagtatcaaacgcagggacattttatgtgtgttctgttacccaaaggcatacattacgaaatatatagatgctcgctggagaaactggcacaatctagaaagcgctgttttccccgtttgtttttcttggtgtgtatggagtgagtgccaaaaagcctcaagtaacctttttttatctccagggtttggagggttctggaagtaaacatcatagttcgccgttgccaggcgctgttgagttgctgccttgctcttatctaggggtctagatggccttccctgcaacccccgcccccctgcgctcccgcgtccccccgcgccccgccctcccctcggtgttcccgtccacgcccctgctcccgcgccttcgctccagttctcgtgcccccgcccctccccccgcgccctttcccagtggttgcaataacggacttagaggtctggacaattcaagtaaggaacaaggctcgcttatccaagttctcgcaggataaaagtttgttatgaacgatttcacatggtttctctttatcagaaagttgttagggacttttaatcgcagaattggcctcgggtgcccacgctctagtattgaaatggcggttttgggacaaataagcaacatccgtgggagtggaaagcgacagacctgatcccggaagcgttacagctaggcgccaagttcacaggcgcgaagttcaaatttgtcttgtgaccactgtgataggtgggtacaggggagcgcgggcgagcacacgtgaattactgctaccgccccctaggtccgggcactataaaggggcctgcgcctggcgttgttcatcgcagttgctccggatctttgcacacactccacgggcagttggaggtgagctgctgccggccacgccagaggctgcaacaccaggtaggtgaccggctggtcggactgagatgggtgctgaagtggtccagaggttaatcctaattgagtgacttaattaaaatcaggaccactgtataccttggactctggttgcccgtgtaggcctgaggtgggagtagaggaagtggcagcgaggggagaagtggaggcgccagtggtagcattgggggaggtgggggcgcccatggtggtgtaggaaacatatggtggcgccagtggcggcattgggaggggtgggggcgccggtggcggcgtaggagcagctggtagtgccagtggcggcgtggggagaaggggcgctggtggcgtcattgcagatagtggggggcctggtggtggcgtagaaggaggtgttggtgccagtggcgggtggagagaagtaggggcaccagtggcggcgttgggggaagtgggggtgcctgtggcagtgtcggggaagtgggggtgctggtggtggtgtaggagcatgtggtagcaccagtgacggtgtggggagaagtaggggcaccattggcggccttgggggaagtgggagcgctggtggtggcgtaggagcgtgtggtggcgccagtggctatgtaggaatacgtggcgccggtggcggcgcggggagaagtgagggcgctggttgcggcactggggggaggtgggggccccagtggtggtgtaggaacaggtggtgtccctagtggcgggtggggagaagtagggatgccagtggcagcgtggggggaggtgggggtgccagttgcggcctaggagtacttggtggcgttggtggcataggagcacatagtagcgctggcggtgtggggagaagtggaggcgccggtggccgcattgaaggtgggggtgccaatgggggcgttgagggaagtggggggttctggtggcggcgtaggaacacttggtggtggtggaagtggcctaggagcacgtggtggtgctggtgggcgtggggagaagtgaggatgctggtggtggcattggaggtgggggtgccagtggctgtggggagaagtgggggtgcccgttgcagcattggggggaggtgggagctagtggttgtgggtaggggtgtgtgtgtgggggttgaggtctctttggctgaggactgagtggtggtgggagacaggagtggggtagggcagaagttggatagaagtgtgggggagtggaagcctgcttggaaaaccggttgggagcagttgaaggtggctggaggtggttggaggtgcgagtgtgggggaagggtggtggggttgaggcctgattggtggaagactgaggtgagaatggtgggggtagggtccagacctgataggaggaaggagttggggaggggtcaaggcctgtttggtcgaagattggctagaggctggaggcaggaataggaagcgtggagggggtggccggattcatataagaccagtgagaagccagagtggcgggaggtaagggggcagtggaggttggacagaaggaagaaggtgatgagggggcggtggtagcctattctgggtaagattgacagagtggggagtaaagaggtaggggaagggggagaggttgacacccggtaggtgggagacttccttggggcaggagtagggggactgaaggttgtagggaggtggagggccagtgggatgtgggggcggtcgagccctgatacgtggaagactggcaagttgaggtgggagtggagggagtgggaagtgggggcgggtgcagggtgggaagagattggggtggtagaggcctgagtgggaaaagtttgcaacaaaacaaatttaaatccttttcattttgcagagcaaagtttcggctttaaggtggggaagatacccaaagataaatgcagaatgtaaatgtagagatgtctctgcttttgagttctggctttcttttttttttctttttattttattttctttttctttttcttttttgagatggagtctagctctgtggcccaggctggagtgcagtggcacaatctcggctcactgcaagctctgcctcccgggttcacgccattttcctgcctcagcctctcgagtagctgggactacaggcgcccgccaccacgcctggctaattttttgtatttttaatagagatagggtttcaccgtgttagccaggatggtctcgatctcatgacattgtgatctgcccgcctcggcctcccaaagtgctgggattataggcgtgagccactgcgcccggccgagttctggctttcttaagaaagtgtatctttgtctttcactacagacatggatgggtgcaaaaaagagctgccccgcttgcaagagccggaggaggacgaggattggtgagatttagaaagttctgttttcttttagtttagtgttaccgtattggcaaaacagctttctcgagaagtatgtttatttcctttagtatctgtagagcgtataacttggtttgttataaaatgagaattgtaaagaaggattttacaaactaggagtccagcctcctatgaaattcttgaatccgctatataatttctttgttagtggccaggaaatgacgacatttgaggcaacagtgcatcgttgaatatatgtggtttctagaaagttcttcattctga

SEQ ID NO: 94434 - DNA, 45761 bp, Homo sapiens
  misc_feature (1)...(45761): n = A,T,C or G
ctggtgctgtcagccattggtgacctccctgggggctctagcccgtcggaggactcgtgcctgctggagctgcagggctccgtgcgctccgtggactacgttctctttcgctccatccagcgcagccgtgccggctactgcctcagcctggactgtggcctgcggggccccttcgaggaaagccccctgccacggcgccccccacgggctgcccgctcctattcctgctctgcccctgaagctccacccccactgggtgcccccacagctgcccgcagctgccaccggttggagggctggccgccctgggtgggaccctgcttccccgagctgaggcggcgggtcccccggggagggggccgcccagccgcagccccgcccacccgagccccgactcgtcgcttcagcgatagctcaggttccctcaccccaccggggcaccggcctcctcatccggcatccccaccaccgctgctgctgccacggtcccacagcgacccaggcatcacgacctccagtgacactggtgagccccctccccgactgcccaggctcaggagagggtaggcactgggagttaggtggccagtgatgcccaccaggattggggcacagttgaggtccctgaggaggaagaaagggtgagttcactcctctggtagacacttctcaggtactcacctcctagggacagaacatccatagcttagcagctaaaaaaggagaatttttttttttttttgagacggagtctctggctctgtcgcccaggctggagtgcagtggcatgatcttggctcactgcaacccgtttcccgggttcaagtgactctctcctgcttcagcctgccgagtagctgggactacaggtgtgcgccaccatgaccggctaatatttttttttttttttttttttgagacggtgtctcgctctgtcacccaggctggagtgcagccgcgcgatctgtgctcactgcaagctccgcctcccgggttcacgccattctccttcctcagcctcccgagtagtgagtagctgggactacagatgcctgccaccacgcccggctatttttttgtatttttagtagagatggggtttcaccgtgttatccaggatggtctcaatctcctgacctcgtgatctgcccgcctcggcctcccaaagtgctgggattacaggcatgagtcaccgtgcccgggcaatttttgtattttttagtagagacagggtttcacccttttggccaggctggtcttgaactcctgacctcaagtgatccacccgcctcggcctcccaaaaggatttattttttgaaaccagttccacagctctcagcttggtccacttatctgtcctccccaagcttcagctgtcacttgtaaaacatgtataataatagtacttcaggccgggcacggtggcttgcacctgtaatcccagcactgtgggaagctgaggtgggtggatcacctgaggtcgggagttcgagaccagcctggctaacatggtgaaaccctatctctactaaaaatacaaaaattagccaggtgtggtggagcgcgcctgtaattccagctactaacagagaggctaaggcaggagaatcgcttgaacctggaaagcaggggttgccgtgagccaagatcatgccactgcactccagcctgggtgacagagacacactccatctcaaaaacacaaacaaacaaacaaaaaacatgtataataacagtacttcagccataggcattgtactcgaagatgctgagaaaggagacagtggccgggcaaggctgttcacacctataatcccagcactttgggaggccaaggcaggtggatcacctgaggtcaggagttcaagaccagcctagccaacatggtgaaacccccatctctactaaaaattcaaaaattagctgggcctggtggtggacgcctgtaatcccagctactagggaggctgaggcaggagaatcgcttgaacctgggaggcggaggttgcagtgagctgagatcgtaccactgcactccggcctgggcaacacagtgagactccatctcaaaaaaataagaaaggagatagtactggggaacgctcagcactgtgcgccaggtgctgaacaacaccactgcagtccttgttgtggtggattgtaccatctagttgctggctaatatggacagagatgctggccctttgattggggatggagcgtgggagctgtgaaagctcctctgggcttgagttcccacaggagggtgggcgtgtccacagaacacttccactcactccctgtctccctttctctcttctccccagctgacttcagggacctttataccaaagtgcttgaggaagaagctgcttctgtttcctctgcagatacaggtcaggcatgtggtttgcgccccagggatggggattgggcatggctgcccagccccctctccaccctacaataccattctcttatctctgtctctctgcagggctctgctctgaagcctgcctcttccgcctagcccgctgcccttcccccaagttgctacgtgcccggtcagccgagaaacggcgccctgtgcccaccttccaaaaagttcccctgccctcgggccctgcacctgcccactccctgggggacctaaagggcagctggccaggtcggggcctggtcactcgtttcctccagatatccaggaaagccccagaccccagtgggactggagctcatggacataagcaggtaggaattcggggagccaggaaagatgtttgggaaagcgtggagcttcagattgagccttattgatgatgccctttcttgtgtccctgtccaggtgccccggagcctgtggggccggcctggccgagagagcctccaccttcgcagctgcggagatctgagctctagctcttccctgcggcgtctcctgtctggccgcaggctggagcgtggtacccgcccccacagcctcagcctcaacgggggcagccgggagactgggctctgacctaggcttcttgtcacactgaacacatccagccacaggcaccagctggttgggaccagcagcccccagcatcctcttgcactggctggcacaaaaagaaacctgctgtataccccccaaagtgtccctttccctcctacctctggggtctcttgctgcttgcctctgctgctctggactgggagagcttctgtcctgtgctgcatgggtatttagactgtgggggagatgccccttcttatagcactggaggaggaaaacaaattcttgtccccctcagaatgagagtggctctttctgatttgcaagggcactatggtcagggcaaaggcatggcccaggtgtttaagtacagggtgacgtgtgcctatgcaatggggtggtaaggcaggcacgaagagtccaaaaaatctaggtggcctctcagctctgccacctctagctgcatgaccttgggcaagctatgtaaccccaattgcctgctccattaaagactgtgaaggtagaatgtttgtaaagctcttaacagtatgtaagccttcaataaatttcagttttccccttgttttcttgatcattctctgtcaccagtgaaatttgttctagtgtctctcatatttaagaaaactctttcaggactgggtatggtggctcacacctataatcctagcactttgggaggccgaagcaagaggatcgcctgagcctaggaattcaagaccagcctgggcaacatagtgagaccctgtctctacaaaaaacaaaaaattagccaggcatggtgggacacgcctgtagtcccaactactcaggtggctaaggtgagaggatcacttgagcttgggaagtccaggctgcagtaagctgtgattgagccactgcactacagcctgggcaacagagcaagaccatgtctcaaaaaaaaaaaaaaaagaaaaaagaaactttcaagacactctttccaaccactaattgtaactctgctcctccttttcacagcaataggttttctttttcttccctccactgttaaacatccattctctcctcacccacccccatcagactccttcccctatctttccacagccactgctctgaccaaactttccagtgaccacagtggtgtcagacccagtgaccatttctctgcctgcatctcacttgacctcgaggcagcaattaatacccataatcagcatcttcttgaatttgtccctttgaaaagggaaatattggctcttctactttgtcctgctgaactgcttaacattggagggccccagggccctcacctaagccctctttcctacctccactctttctataggtggccctactactaaagtccatggctttaaataccatctttctatgtgttaatccataactccagccttgacctcccatgagcgccatccaactcagcatgtctgcttggatgtctaatgggcatttcagattcaacatggccacaactgaactcttgattcccaccccagcaccggttatttttccactgttcccatctcaatggcacctccattacccatttgcacattccaaaagctcaggaaccatggtgacttcttttcccatatccaacacaaccaatcctatcctgaattcatccacatcccaccacctccccagctacctagctccagccatcctctctccacaacctctgaatcagtctttcacttttcccagcaatccattctccactcagcaaaatgatgataaagcacgtcacatcaaggctctgcctcaatttaatggcttcccattgtatttagaatcatctccaaactcccagagactatggtcagctacaatctggcccaccttctgttccagccaaatttcctcacagcacaaggacgtttgcacctgctgttttccaagcatgaaacccttggcccctatatctggtgctatcacctaatatcaggttttagctccattctcaccatttcagtgagcacccaatccccatcgcagtcattctatcacatagccatgtttttttttgtttgtttgtttcattttgtctttttttgagacagggtcttgctttgttacccaggctggagtgcagtggtgtgatttgggctcactgcaaccttccacctcctgggttcaagcaattctcctgcctcagcctcccgagtagctgggattacaggcgcccgtccccatgcccgcccagctaaattttgtatttttagaagagatagggtttcaccatgttggccaggcgggtctcaaactcctgacctcaagtaatccgcctgcctcggtctcccaaagtgctgggattacaggtgtgactcaccgcgcctggccacatacccatggtttcagcatgtatcactatctaaaattattatttttgtttatatatctgtgtcgtcccatagaatgttaaggtcccaagatcagaaacttgctcattgcagtgggtctaacactcagtaggtcctcaacaaacattcgttaagatactaaagtggcagggtggggccctgtaaacagcttcaggaccctgtgcttgtaggggcaacgtggtgccctccaaggaagacagggaggtgggaggagcactgcccagagatggcgtcaggctgcaagacttcttgaataattcagcatcataacaacccagcctcaggaagggatagggcacggccaggacgaaacattaggaggcgatggacaatgggattcccacggggcagcttctgcgcactggacgttccctaacctgaggctctctaaagaggaaggttaggaatcctctgagcttcggtgggctggactcactgtgggaattcaatcgcccccatccaccaacagtgtgctggcgggaaaacgccgacacgcatgcgtagttctcgcgccggctcctctctctctctctctctctctcgctcgctctctcgctctctcgctctctctcgctcgctctctcgctctcgctctctctctctctccggctcgccagcgacacttgttcgttcaacttgaccaatgagacttgaggaagggctctgagtcccgcctctgcatgagtgaccgtctcttttccaatccaggycccgccccgactccccagggctgcttttctcgcggctgcgggtggtcgggctgcatcctgccttcagagtcttactgcgcggggccccagtctccagtcccgcccaggcgcctttgcaggctgcggtgggatttcgttttgcctccggttggggctgctgtttctcttcgccgacggtaggcgtaatgaatatttcgacctttggatcttagctgtcccctccctgcgttcgcacttaacctttttcaccattattattattattgttattattattattttttgagggagtctcgccctgtcgcccaggctggagtgtaatggcgccttcttggctcactgcaacctccgcctcccgggttcaggcgattctccgacctcagcctcccaagtacgtgggattacaagcacccgccaccacgcacggctaattttttgtatcttttagtagagacggggtttcaccatgttggtcaggctggtctccaattcctgacctcgtgatccgcccgcctcggcctgccaaacagctgtgattataggcgtgagccaccgcgcccggccaaccatcattattatttttaacggtaaggatggtcagattttactaatgaagaagagattataaaatcttcaagtctttatatccacttgctttttgaggggtggagtgggaagaaggttatgtaattcatacgttcttcagasatgtgacaaacattcacggagccsgrcgacgagcgtcggggttgggattcgcactggagctgcagatgggtgccaggatggactggtccctaccctccgcttgaacctaggaggcggaggttgcagtgaaccgagatcgtgccactgcactccagcctgggtgacagagatactccgtctcaaaaaaaaaaacaaaacaaaaaacaagcggactgggcgcagtgcctcaccctgtaatcccagcactttgcaaagccaaggcgggaggatcctttgagtttaggagtttgagaccaacctgcgcaacacagtaagaccccgtctctacaaaaaatacagaaattagccaggtgtggtggtgtgcgcctatagtcccagctattctggaggctgaggtgggaggattgcttattctggaggcagaggttgcactgagccgaaatcaagctactacactccatccagggcaacatacggagaccctgtctcaaacaaacaaacaaaaaattgctcagtacctggccaaaaaagaagaggctcactatgcagaggggaagtggaaggagatgtttggacttctaaactcaatagagcaggagaggcaaatgtagaatgtgctcaggaaatatctgtgagatgawtgaacttgagggaagtaaggtactagatattacctgccctacccagaacaaatcctgtgcaatgtttccttgaaaagtgagaagtctggaaggggtggctactgacatagtgaagcaactagttcaattctacaacttgacagctacccctgtgccaggctatctacgaggatacttagaatgcataagacattccttcaaggaactccaggaacagaggcctgacatgttgcaatgtttagtgtcaagcagtgtactagagacacattatcacactcaaacctcacaacaattctgtgaggtaggagttatcactccccttttatagatgaaacagaggcttagagtgattgatttattgaaagtcaaacagccagtaaatggtgtagccaggattccaaacttgctgtctcactgagactgtacttaattactggagggaccgggtgtggtggctcattgctataatcccaacaccttgggaggctgaggctggtggatcacctgaggtcaggggttcgagaccagcctggccaacatggtgaaaccccatctctactaaaaatacaaaaattagctgggcatggtggtgggctcctgtaatcccagctactcaggaggctgaggcagggcaattgcttgagccgagatcacactgcactccagcctgggcaacagggcaagactctgtctcaaaaccaaaaaaaaaaaaaattactggaggaacctagaagaagaaatgatcaattttgcttggagtgtatctagaaagacttcactgagatcatttaaagaacaaaaaggatggctggggtccagcgcagtggctcatgcctrtaatcccagcactttcggataccaaggcagcagatcacctgaggtccagagtttcagaccagcctggccaacatagygaaaccccatctctactaaaaataaaaaaattagctgagcatgttggagggcacctgtaatcccagctacttgggaggctgaggcaggagaatcactcgaacccaggaggyggaggttgcagtgagccaagatcacgccactgcactccagcctgggcaacagagtgagactctgtctcaaaaaacaacaacaacaaaaaatacaaacaagagacaagtagttcccaggtgcctaccaagtggtcaggcactgcacttacctcactgactgcagtaaccaccctttgaggttgtggcattgcctccattttccaggcaaggaaatgggctgagagctgggattagtcaggtcatgactgtgtgtgccactcccgctaaatctcatttgatgtggttcatgaggccacaccatggacagcttcctccttgtgtccactgaggatatggctttgtacaacactttggtttttgaacgactttacaaacctccctgtcttgtgaggaaggaagaacagttattaccatctgcatctgatgatgaaacaagggacgctgcagaggagccgcactgaccactccctccctccagtcctgtcatcccactgccagtgtcccaccctcttgtgccctgcacttcactggctaataacccccctcactttttcctctgtgaagccatcctggataattccccacccacgaatggtccctcctcatctcagagagctctccatgcacacctgttaccgtttctgtctttatctgtaaatatctgtgtgtctgacttccatgcctcacacacctctatagggcaaagactgtcttaaacatcttggtagtgtcagtattttgcacagtgaagtttttttttttaaattatatcagctttatttgtacctttttgacatttctatcaaaaaagaagtgtgcctgctgtggttcccatcctctgggatttaggagcctctaccccattctccatgcaaatctgtgttctaggctcttcctaaagttgtcacccatacatgccctccagagttttatagggcatataatctgtaacagatgagaggaagccaattgccctttagaaatatggctgtgattgcctcacttcctgtgtcatgtgacgctcctagtcatcacatgacccatccacatygggaagccggaattacttgcagggctaacctagtgcctatagctawggcaggtacctgcatccttgtttttgtttagtggatcctctatccttcagagactctggaacccctgtgstcttctcytcatctartgaccctgaggkgatggagttttcaagtccttccagagaggtaagagagagagctcccaatcagcattgtcacagtgcttctggaatcctggcactggaatttaatgaatgacagactctctttgaatccagggccatcatggctctttgagcaaggcacagatggagggaggggtcgaagttgaaatgggtgggaagagtggtggggagcatcctgatttggggtgggcagagagttgtcatcagaagggttgcagggagagctgcacccaggtktctgtgggccttgtcctaatgaatgtgggagaccrggccatgggcacccaaaggcagctaagccctgcccrggagagtagttgaggggtggagagggrcttgcttttcagtcattcctcattctgtcctcaggaatgtcccaagcctttgagtagggtaagcatcatggctggcagcctcacaggattgcttctacttcaggcagtgtcgtgrgcatcaggtgagtgagtcaaggcagtggggaggtagcacagagcctcccttctgcctcatagtcctttggtagccttccagtaagctggtggtagacttttagtaggtgctcaataaatccttttgagtgactgagaccaactttggggtgaggattttgttttttttcttttgaaacagagtcttactctgttgcctgggctggagtgcagtggtgcaattttggctcattccaacctctgcctcccagattcaagcgattctcttgcttcagcttcccaggtagctgggattacaggcggccaccactacgcccagctaatttttgtatttttagtagagacggggtttcaccatgctggcaaggcaggtctcaaactcctcacctcaggtgatccgcccacctcggcctcctaaagtgctaggattacaggtgtgagcccctgcgcccggccaaggggtgaggaattttgaaaccgtgttcagtctctcctagcagatgtgtccattctccatgtcttcatcagacctcactctgcttgtactccctccctcccaggtgcccgcccctgcatccctaaaagcttcggctacagctcggtgstgtstgtctgcaatgccacatactgtgactcctttgaccccccgacctttcctgcccttggtaccktcagccgctayragagyabamgcagtgrgcgayggatggagctgagtatggggcccatccaggctaatcacacgggcacaggtaaccattacacccctcaccccctgggccaggctgggtcctcctagaggtaaatggtgtcagtgatcaccatggagtttcccgctgggtactgatacccttattccctgtggatgtcctcaggcctgctactgaccctgcagccagaacagaagttccagaaagtgaasggatttggaggggccatgacagatgctgctrctctcaacatccttgccctgtcaccccctgcccaaaatttgctacttaaatygtacttctctgaagaaggtgaggaggaaggggacaagatgacatagagccattgaaacttttcrtttttcttttctttttttaaaatttttttgaggcagaatctcactctgcccattctgtcggcgagacaggagtgcagtggtgtgatctcccctcacagcaacctctgcctcccaggctatagtgattctcctgcctcagcctcctgagtagctggaattataggcgtgcgccactaccacctggctaatttttgtatttttagtagagacagggtttcatcatgttgaccaggctagtcttaaactcctgacctcaaatgatatacctgccttggcctcccgaagtgctggaattacaagtgtgagccaccgagcccagcagacacttttcttttttctttttttttttttgagacagagtctcgcactgtcacccaggctggagtgcagtggcacaatctcagctcactgcaacctccacctcccgggttcaggtgattctcctgtctcagcctctcgagtacctgggattacaggtgcctgccaccacgcccggctaattttttgtatttttagtagagacagggtttcactatgttggccaggatgattgcgaactcctgacctcgtgatctgcccacatcggcctcccaaagtgctgggattacatgcgtgagccactgacacttttctttgccmwttctttggaccctgacttctgcccatccctgacatttggttcctgtyttaatgccctgtgaaataagatttcsccgcctatcatctgctaactgctacggactcaggctcagaaaggcctgcgcttcacccaggtgccagcctccacaggttccaacccaggagcccaagttccctttggccctgactcagacactattaggactggcaagtgataagcagagtcccatactctcctattgactcggactaccatatcttgatcatccttttctgtagraatcggatatracatcayccrggtacccatggccagctgtgacttctccatcykcacctacayctakgmagacacccctsatgatttccagttgcacaacttcagcctcccagaggaagataccaagctcaaggtaggcattctagctttttcaggccctgagggccctgatgtctgggggttgagaaactgtagggtaggtctgcttgtacagacattttgtcccctgctgttttgtcctgggggtgggagggtgggggctaatggctgaaccggatgcactggttgggctagtatgtgttccaactctgggtgcttctctcttcactacctttgtctctagatacccctgattcaccgagccctgcagttggcccagcgtcccgtttsactccttgmcagcycctrgacatcamccactyggctcaagaccarkgkarmggkgaatgggaagkrgycactcragggacagcccrragacatctaccaccagacctgggccagayacwttgtgaagtaagggatcagcaaggatgtgggatcaggactggcctcccatttagccatgctgatctgtgtcccaaccctcaacctagttccacttccagatctgcctgtcctcagctcacctttctaccttctgggcctttcagccttgggcctgtcaatcttgcccactccatcaggcttcctgttctctcggtctgrcccactttctttttatttttcttcttttttttttttttgagaaggagtctctctctctgtcacccaggctggagtgctgtggcgccatcttcactcactgtaacctctgcctcctgagttcaagcaattctcctgcctcagccttccaagtagctgggattataggcgcctgccaccaggcccrgctgatttttctatttttagtagagacggggtttcgccaggctgttctcgaactcctgaactcaagtgatccacctgcctcggcttcccaaagtgctgggattacaggtgtgagccaccacacccagctggtctggtccactttcttggccggatcattcatgacctttctcttgccaggttcctggatgcctatgctgagcacaagttacagttctgggcagtgasagctkaaaatgagccttctgctgggctgttgagtggataccccttccagtgcctgggcttcacccctgaacakcagyragacttmattgcccgtgacctagrtcbtaccctygccaacrrtactcaccacaatgtccgcctactcatgctggatgaccaacgcttgctgctgcyccactgggcaaaggtggtaaggcctggacctccatggtgctccagtgaccttcaaatccagcatccaaatgactggctcccaaacttagagcgatttctctacccaactatggattcctagagcaccattcccctggacctccagggtgccatggatcccacagttgtcgcttgaaacctttctaggggctgggcgaggtggctcactcatgcaaacccagcactttgggaagccgaggcgggtgatcacctgaggtcaggagtttaagaccaccctggccaacgtgttgaaaccctgtgtctactaaaatacaaaaaaaaaaaattatctgggcatgatggtgggtgtctgtaatcccagctactcaggaggctgagaagggagaatcagttgaacccgggagatggtggttgcggtgagccgagatcgcgccactgcactccagcctgggaggctgagcgagactccatctcgaaacaaaacaaaacaaaactatctaggctgggggtggtggttcatgtatgtatgtgtatatacatatatatgtgtttatatgtatatatatatacacacacacacatacatacacacacatacacacacaaattagctgggtgtggcacccgtgtagtcccagctactcaggaggctaatgtgggaggatcagttgaccctaggaagtcaaggctgcagtgagtcgtgattgcgccactgtactccagcccgagtgacagagtgacatcctgtctcaaaaacaaaaaaaaatctccccaaacctctctagttgcattcttcccgtcacccaactccaggattcctacaacaggaactagaagttccagaagcctgtgtgcaaggtccaggatcagttgctcttcctttgcaggtactgacagacccagaagcagctaaatatgttcatggcattgytgtacrttgkyacctgsactttctggmtccagccaaagccayccyakggragacacaccrcctgttccccaacaccatgctctttgcctcagagrcckgtgtgggctccaagttctgggagcagagtstgsggctagrctyctgggatcgagggatgcagtacagccacagcatcatcacggtaagccaccccagtctcccttcctgcaaagcagacctcagacctcttactagtttcaccaaagactgacagaagcccttcctgtccagctttccccagctagcctgcccttttgagcaactctggggaaccatgattccctatcttccctttccttcacaggtctgcacacctcattgccccttttgcaactactgaggcacttgcagctgcctcagacttctcagctccccttgagatgcctggatcttcacacccccaactccttagctactaaggaatgtgcccctcacagggctgacctacccacagctgcctctcccacatgtgacccttacctacactctctggggacccccagtgttgmgcctttgtctctttgcctttgtccttaccctagaacctcctgtaccatktggtcggctggaccgactggaaccttgccctgaaccycgaagraggacycawtwggktgcgtamctttbtcdacagtcycwycattgtagacatcaccaagswcacgttttacaaacagcccatgttctaccaccttggccacttcaggtgagtggagggcgggcacccccattccataccaggcctatcatctcctacatcggatggcttacatcactctacaccacgagggagcaggaaggtgttcagggtggaacctcggaagaggcacacccatccccttttgcaccatggaggcaggaagtgactaggtagcaacagaaaaccccaatgcctgaggctggactgcgatgcagaaaagcagggtcagtgcccagcagcatggctccaggcctagagagccagggcagagcctctgcaggagttatggggtgggtccgtgggtgggygacttcttagatgagggtttcatgggaggtaccccgagggactctgaccatctgttcccacattcagcaagttcattcctgagggctcccagagagtggggctggttgccagtcagaagaacgaccbggacscagtggcactgatgcatcccgatggctctsctgttgtggtcrtsctaaascggtgagggcaatggtgaggtctgggaagtgggctgaagacagcgttgggggccttggcaggatcacactctcagcttctcctccctgctccctagctcctctaaggatgtgcctcttaccatcaaggatcctgctgtgggcttcctggagacaatctcacctggctactccattcacacctacctgtggcgtcgccagtgatggagcagatactcaaggaggcactgggctcagcctgggcattaaagggacagagtcagctcacacgctgtctgtgactaaagagggcacaacagggccagtgtgagcttacagcgacgtaagcccaggggcaatggtttgggtgactcactttcccctctaggtggtgccaggggctggaggcccctagaaaaagatcagtaagccccagtgtccccccagcccccatgcttatgtgaacatgcgctgtgtgctgcttgctttggaaactgggcctgggtccaggcctagggtgagctcactgtccgtacaaacacaagatcagggctgagggtaaggaaaagaagagactaggaaagctgggcccaaaactggagactgtttgtctttcctggagatgcagaactgggcccgtggagcagcagtgtcagcatcagggcggaagccttaaagcagcagcgggtgtgcccaggcacccagatgattcctatggcaccagccaggaaaaatggcagctcttaaaggagaaaatgtttgagcccagtcagtgtgagtggctttattctgggtggcagcaccccgtgtccggctgtaccaacaacgaggaggcacgggggcctctggaatgcatgagagtagaaaaaccagtcttgggagcgtgaggacaaatcattcctcttcatcctcctcagccatgcccagggtccgggtgcctggggcccgagcaggcgttgcccgctggatggagacaatgccgctgagcaaggcgtagcccaccatggctgccagtcctgccagcacagataggatctggttccggcgccggtatggctcctcctcagtctctgggcctgctggtgtctggcgttgcggtggtacctcagctgagggtcaaggaaggaaggtgtgttaggagaactagttcttggatccctgcccactctccccagggctgcccctcccatctgccccttacctccatcccaggggaagtagagactgagaatgtgggtacaataggcacagaggttgtgcagcccacgcaggtggacctgcagcttcccactgggcagctttgcctgcagcagcagggccaagtagctgaagacgaaggcgtccaaggaggcagggctggagcagagagagaagggtgggatggaggagaaccactggggtagaaggggtaaagatggagctggaggaagagtcagccttgggaggtgggctctgggcagcaggcggccaccagggaaggacaggacacacagttctagacctggtatggggagagatccccaggtggcgccagcctggccctgaatagggctctatcccagggctgcataaagggcacattcagtgccccacagctcttcaggcccctcctgtgcctggctgccctcccaccctacccttttgtacctctgagaaggctctggccccacgcacagccccactgtcaccagggccagtatctgtctcagggacctcctatccagagcctgagccagccccagccccagccccagctccagctgctccatctgaacctgtatcttcttccaagccacccattaccctcttggagtcagactcacgcatctccaaagaagaacttttgagagcccaggcgctgagagagcagggtcagacactcccgagcctctcggtacagctgtaggggcgacacaggtaggcttgcagctgygggaacagtgccacctcygcacctaagcactcccattcctggccagcatccttggggctcatctcatacaatagcccccggtctcagagctacctccttctccagctcttcctcgtcctcaggcctgtgctccccagtcagcagctgtagccgttccatgtactgccgctgcatgcggccaggcaggaagaagttgaggggaaagggcatagcctctgcataccacttccgggtcacttctacgtagttcttggtgtctatccaaaaagtatgtmcctggattgggtrggcaggaagaaacaggcaggtctgagccagtgcacctgtctgattcaaggtgggcttctgaccyccatgctytcctgagyctstgtgtgggtctgtgtgtkcccgtcccctccccggctggccatggatgctgggaggtctgggcacactcaccagcaccgggatcaacttctcctccaggagagacatgaaggccagggtgtctgccccttgctgagctgacagatcataatcagcattgtacttctgtggaggaaatatccatggcgtggacgctggggagctgcaagggcacttcaccagggaggaaggagtcctgtctggtacccccctcactggcctctgagtgcagtggaggtacagcaaggaacttttcctgccaaggcccccttgcctgggcccagccagtagcctgttgctgttggcaaaaagcctgggccttggagcccgctggccgtcaaggtcctgggcccattgagaagaaggaagaaaggttgggccgcaaactaggagcagctcccagaatttccatggaaagctggaacaatgcctgctgacagcaactttctaacagtaactttcccgacccagacaccacaaagctagcacaacggagctcagatgcaggctaggactcggtccatgcctcaggaaccagrgaaagccatcctcacactccctggatccagggaacccacgcccagggccccccagcttgttccctcagtgcccagctcttggctatttctttcacttcattccatcgcycagacaccattaccacatacacattccayccatacccccaggtctcagcctgccctaccttcccaggctccagtccctgttcctcagcatcccccaccacatcctgagtaagctttgtccccagataacctcttcagcatgatccttaaatctccctaagcctcagtttctcccctgtggaatgggggtaagaatctctttctctgaatgcccctgtgttaggaaataatttagaatacttyggaaacaaaaagctctgttcacacctaagcaatcagggcagtggccctggccttgccaggaacttaggcttttatctggatcctctttccaggcctctcaattaattccccaggtccttaacctttgggaaattagaaattaggaagagtgtcccacttctgacactgtgttccctcttggaacctgaccgtcaatgctagaagaacccttggaaaacatgctggcccagccctctagttttacaaataagggagtgcacagccctgagaggttacatggcctgcccaagatcacgcagtcaatggcagagtaaagagcatagcctaggcctccccactcctctagtaatgctctttcatcttctccaacctggctctaagccttgtccatcctgagccccatatctagcccaacctagtccctgaaaacaagaagtggcccttagaaatctctctccagtcccactatcagaggccaactgctgtcttccagtctccttcagcctgtgctcctctccctccctgactgacaggcagaaggtacygtgcctctggatatccccacagtgccctgagctgcatctcttgcygactgctttaatacatcacagtgacattgtgtgtgtctctgccaccagactattgctccttgatgctctgggtcacctgcatctagcatggcatatatctagtgctcaataaatgtgtattgtacrgaattgactgaacttctctcactggcagccccctctatccaaatcacccacctctttttgaaggtgggtgatgatcttgtgtggtactgaggtgacctctccatgactggtccaaagggcaggcagggttcctgatactgagagaaaagtataccaaccaggaccttagctgcctatccatacgtagttgcaacacattcctgcctatctcctgcttctcctcttgtacacacccttcctcacccccaagggatactgggtacctgaagggctctgccaggggttgctgatcttgtgctatatggtgcacaagaaacttttaagaaaaaagaaactttcaagacacactttccaaccacgaattctatctctgctccttttcatagcaataggttttctttttcttccctccacacttaaacatccattctcttatcacccacccccatcagactccttcccctgtgtttcttcagccactgctctgaccaaaatttgagtgaccaaaagtggtgtcagacccagtgaccatttctctgcctgcatttcacttgaccttgaagcagcaattaatctccataatcagcatcttcttgaatttttccctttgaggacattgctcttctactttgtgctctggttatcctttacaaacttttacacctctcctgaactggttaacagtagagggccccaagggtctcacgtaagccttctttgtttttgttttttttcttttmttttattttttatatatttttttgagacggagtcttgctctgttgcccgggctggagtgcagttgcacgatctcggctcactgcaagctctgcctcccaggttcatgctattctcctgcctcagcctcccgagtagctgggactacaggtgcctgccaccatgcctggctaattttctgtatttttaacagagacagggtatcaccatgttagccaggatggtctcgatctcctgacctcgtgatctgcccacctcagcctcccaaaatgctgggattacaggcgtgagccactgctcccagccgtcatttttattttattttatttatttttttgagatggagtcttgctcttttgccaggctggagtgcatggtgcgatctcggctcattgcaacccccgcctcccaggttcaagcgattctcctgcctcagcctcctgagtggctgggactacaggtgcctgtcaccatgcctggctaattttctgtatttttagttgagacaggttttcaccttgttagccaggatggtctcgatctgctgacctcgtgatctgcctgcgtcggcctcccaaagtgctgggattacaggcatgagccactgcacccggccatcaattttttttttttttaaatggagtcttgctctgtcacccrggttggagtgtaacagtgcaatcttggctcattgcaacctccgcctcttgggttcaagcgattctcctgcctcagcctcctgagtagctgggactacaggtgcatgccaccacacccggctagtttttgtatttttagtagagacggggtttcaccatgttgtccaggatggtctcaaactcctgacctcaaatgatgtgcctgccttgaccttccaaagtgctgggattagaggcgtgaaccacattgcccaccgtaagccctcttttctacttccactctttctgtaggtggccctactactaacgtccatggctttaagtaccatctttctatgtgttaatgcataastccagccttgacctctcttgagcgccatccaactcagcatatctggttggatgtctaatgagtatttcaaattcaacatggccacaactgaactaactgaactcttttttttttttaggcagagttttgctcttgttgcccaggctggagtgcaatggcgagatcttggctcactgcaacctctgcctccagggttcaagcgattctcctgcctcagcctcccgagtagatgggattataggccccgctacccggctaatgtttttgtatttttagtagagacagggtgttgccatattgaccaggctggtctgcaaatcctgacctcaggtgatccccctgcctcggcctcccaaagtgctggaattacaggcgtgagtcactgcgcccggccacacaactgagctcttcattcccaccccagcaccggttatttttccactgttcccatctcaatggcacctccattacccatttgcacattccaaaagcccaggaaccatggtgacttcttttcccatatccaacacaaccaatcctatcttgaattcatccacgtcccaccacctccccagctacctagttccagccaccctctctccacaacctctgaatcaatctttcacttttcccagcaatccattctccactcagcaaaatgatgataaagcacgtcacatcaaggctctgcctcaatttaatggcttcccattgtatttagaatcatctccaagctctcagagactatggtcagctacaatctggcccaccttctgttccagccaaatttcctcacagcacaaggacgtttgcacctgctattttccaagcacgaaaccctcgggcagatatatctggtgctgtcacctaatttcaggttttaactccactctcaccatttcagtgaggacctaatccccatcgcagtcattctatcacatagctttattttattttattttatttttttttgagatacagtctggctctctcacccaggctggagtgcagtggtgtgatctgggctcactgcaaacttccatctcctgcgttcaagcgattctcctgcctcagcttcccgagtagctgggattacaggtgtctgccatcacgcctgactaagttttgtattttcagtagagacggggttttgccatgttagccaggctggtctcgaactccttgacctcaagtgatccacctgcctcagcctcccacaatgttggatttacaggcgtgagccactgctcccggccacatagccatgttttaagcatgtatcactatctaaaattattttttgtttatacgtttgtgtcgtcctgtagaatgtaaggtcacaagatcagggacttgctcattgcactgggtctaacacacagtgcttcctcaacaaacactcgttaagatactaacgtggcagagtggggccttgtaaacagtttcaggaccctgtgcttgtaagagcaacgtggtgccctcccaagraagacagggaggatgcaggagcactgcccagagatggcgtcaggctgcaagacatcttgaataattcaccatcgtaacaacccagcctcaggaagagatggggcaaggccagaacgaaacattaggtaagaggcggtggacaatgggattcccacagggcagcttttgggcactggacgttccctaacctgaggctctctgaagaggaaggttaggaatcctctsagcttcggtgggctggactcactgtgggaattcaatcgccccccccacccactaagggtgtgctggcgggaaagcgctgagacgcatgcgtagttctcgcgtctggcacccgctccctttccaatacgcttgcgccccrtctgtgctacggatggtcagggagagttgtccgtcttcaaatggaccaatgagacttgtggaggggctctgagtcccgcctctggatgagtgaccgtctcttttccaagtgaggccccgccccgcctccccagggctgcttttctcgcggcacgggtggtggggctgcttcttgacttccgcgcctagtgcgcrgggccccattctccagtcccgcccacgcgcctttggaggctgcggtgggatttccttttgccttcggttggggctgctgtttctcttcgccgacggtaggcattataaatatttcgccctttgaattttagctctcccctcccggcgttcgcacttagcctttttcatcattatcattatttttaatggtaaggatggtcaaattttactaatgaagcgattataaaatcttcaagtctttgtatccacttgctttttgagggctggagtgggaagaaaggtatataattcattcattcttcggacatgtgacaaacgttcacggagcgcggcaacgagcgccggtgtcgcgatgcgcactggggctgcacatgggagccaggatggactggactggtccctgccctgcccgctgacgattggcaggccactgcctttgatgagctgggcgctataactgccattaagccatttgtacaattaatcacaacagtgataagagcgacaaaggagctattcgggtggctgaggcgggaggatcttttgagccyaggagttcgagaccagcctggggaatagagcgagatcctgtctcaaaaaaagggggagaaaaagtgacaaagaagttgtgagggctatgagtttgcgttagaggaggtgtgtgaggtggggaggcggcagggggcgcggttgttcttagagaaagtgacatccgggctaattttgaaagaataagtgttaactaggctaagcggtgggaaagagtagtgtgtgctgaaggaagggaagaggaacctggcaagttcatggcaggctgtaattggatgctggtctccctccacacttgactcctacagtctgatttctacacagcacccaaagtgatctcttaaaaatacacatgtgatcttgtcacttcccagcaccaaactctacagtgaatttccatcttagaacaaaattcagactccttaccatggccaccaagaccctacacaatctggcctcccaatttccttttccaaggtcaccttttaccactatccatctcactcacactgctccagcactctctatgcttttatttttctttcttcctctttctttctttctttctttttctttttctttctttctttccttccttctctctctctctctttcttttcttttctctttctttttttttttttgagatgcagtcttgctctgtcacccaggtggtgtgatcttggctcactgcaacccagagcagtgggggtgatcttggctcactgcagcctccgccttccaggttcaagcaattctgcctcagcctcctgagtagcagggattagcgccatcagtcccagctaatttttgtatttttagtagagatttcatcatgttgtccaggctggtctcgaactcctgacttcaagtgatctgcccatctcagcctcctaaagtgctgagattacaggcaggagccaccacacctggctcagtatttgttttatttttgttgtgtttatttatttagagacaaggtcttgctctgttgctcaggctggagtgctgtggcaggaacacagctcactgcagcctccactacctcaattcaggcgatcctcccacctcagctgagactacaggtgtgcatcaccatgcctggttaattttttcgttttaccatgttggccaggtttgtctcgaactcttgggctctgctgtcctcctaccttagcctcccaaagtgctaggattgtaggcgtgagccactgtgcccagctggtgttcagtatttgaatccatatttcctgtagccgcaaccaaagttccactgttaggtctcactttgactttaataattgtgttcaggctgggcacactggctcaagcctgtaatctcagcagtttgggaggccgaggtgggtggatcacatgaggtcaggtgtttgagaccagcctgtccaacatggcgaaaccctgtctctactaaaaatacaaaacattctccgatcgtagtggcgggcgcctgtaatcccagctacttgggaggctgaagcaggagaattgcttgaacctgggaggcagaggttgcagtgagcggagatcacgtcattgcactccagcctgggctacagagcgagactctgtctcaataagtaaataaataaataaataaataaataaataaataaataaataattgtgttcggagtcagcatcattcttcctgaagttcaccactcctttgccaagaacacttcctgaaacactgacaagcaggaccttgaatartggggtatggttggtaacaactcactcattcaacaaacattgagcacctattttgtgcttgcctctaaatgaagagctggttgtattatttatttttttaggtgacagggctttccctatgttgcccaggttcgtctcaaactcctgggctcaaaagatcctcatcttctcaagtggttgaatatacacgctccagcgaccatgcctggctgaatgaagagctttgagattttgaagaaacaggaaccatgaaatttgctttgcaactgtttgcaacctttaaggaagactgaaaaggcattcctgaagcatgtgagaagcagtctgtgtgacctgatgactcagaactgcttggaatttagattaggacagatatgagcttaggcttcactctgccacatatttaacttctctaagtcttagttttcttttctttttttttttttttgagatggagtctcgctctgtcacccaggctggagtgcagtggcacgatcttggctcactgcaagctccgcctcccgggttcacgccatcctcctgcctcagccacccgagtagcggggactacagtcgcacaccgccacgcctggctaaatttttgtatttttagtagagacggggtttcaccgtgttagccaggatggtctcgatctcctaaccttgtgatccgcccgcttcggcctcccaaagtgttgggattacaggtgtgagccatcgcgtctggcctctaagtcttaattttcttatctgtaatgtagagttgtcaggctagtgcatgtaataagcactcatgaaagactgactattatcttgcgaaaaattggaagagatcatgaggtacaaggaccttccatctgcactgggctgtacattgaatgttgtggttactgttgaagcattggtaaatcacatgaatccaatggtaaaaccacaccctaaggtcagactcagtggctcacgcctgtaattccagcactttgggaaaccaaggcaagaggattgcttgagctcaggagttcgataccagtctaggcaacctgtttctataaaaagttaaaaaattagcttggtgtggtggtgtgcacttctggtcccagctactcaggaggctaaggtgggaggatcccttgagcccaggtggtcgaggctgcagtgagccaggatcacaccattgcattccagcctggatgacagtgtgaggccctgtcttaaaaaagacaaaaacaaaccaaaaaaacccacaccctagtgggtaaggggcagcagaggtcccacccaagagtgaaatcatttttggtgtcagtaatcagggagagtaatataccctcaggccagaaactagaggtgagtgatggctcacgcctataatcccagcaccttgggaggctgaggcaggtggattgcttgacctcaggaattcgagaccagcctgggcaacatagsaagaccccatctctaaaaataaatttcaaaaattagttgggcatggtggcatgtacctgtagtcccagctactatggaggctgaggtgggaggatccaattgagcctgagaggtcaaagctgcagtgaattgtgattgtgccaagaccctgtctctaaaataaaataaaattacaattaaaaactagagctgaaaggacaggttctaggttaactggtagtagttgttcattcatctgtataaaaagtacttttttgagcacctactctgtgctgtgcatggaatgaacaaatgtctttatttgacttgaacacagaccatagaagtaactaacagtggaactgggagtggcactctccatgggacctaaagacctaggagcctgtgatatgatacctgtcagtgtgaaagggctggagtttgctatctgagccagacctacactccaagacaggtcttgctgggatgggatcaaaattgctgctgggtcagccgaactatttttgtacttctgcttttcacttatatttatgtcttccctaggtatatagctgtctttttttgtttgcttgtttttctgagtcagagtcttgctctgtcactcaggctggagtgcagtggcgcgtctcggctcactgcaacatccacctcgggttcaaacgattctcctgcctcagattcccgagtagctaggattacaggtgcccaccaccatgcccggctaattttttgtatttttaatagagatggggtttagtagagacagggtttcactgtgttatccaggatggtctccatctcctgacctcgtgatctgcccgcctcagcttcccaaagtgctgggattacaggcatgagccactgcgcccggccactggagaccccttttctaccaaaaaaaataaaaataaataaataaatatatatatatatttgtaaagacggagtctctctatgttgcccaggctggtcttgaactcctggcctcaagggatcctcttgtctcagcttcttaaaatgatggggttacaggcatgagccaccgtaccaggccttagcaaactctttttcaagtgctatacaaaggggacagaggaacgtgattgtggccacctagtatgcccctattggccactgcagtgaggcctaggtgtttgaagagaggcacctagggtagtggctctcaggcacaccctaggggcattttggaaatttgtggggcatctttaatagagacaatgattaggaggcactttgagaatttagtggatggagcccaggaaaggtagacattctgcaacatgtagtacattcatacacaaggaagaattcactcatttcacctgacttacaaatataaaatcaaatataaatcagtaggactttattataaaatattgcagaaaagtttcacaagaattttttgtagaaaaagcccaatcagggccgggcatggtggctcatgcctgtaatctcaggactttgggaggccgaggcgggtgaatcacctgaggtcaggagtttgggacaagcctggccaacatggtaaaaccccgtcttgactaaaaatacaaaaatcagccaggcatggtggtgtgcgtctgtaatcccaggtactcgggaggctgaggcaggagaatcgcttgaacccaggaggcggggtttgcagtgagccaagatcaagccactgtgctccagcctgggtgaaagagcaagactccgtcgaaagaaagaaaggaagggaggaagggaggaagggagggagggagggagggagggaaagaaagaaaaaagagaagagaggggaggggagggaagaggagaaaagaaggaaggaaggcaggaaggaaggaatccagtcgagatcgttaaatttgttgtaattttgtctttggcacaataaacattagtccttattaaaactaactttacttagaaaataaaatagaaaatcctcaaggacaaatcacattgtacaggaaatatgaaatgtgaaataatatccaccttggaaattttttttttttgaaacagagtgttactctgtctcccaggctggagtgcagtggcacaatcttgggtctctgcaacctctgactcctgggttcaagtgattctcgtacctcagcttcccaagtagctgggattacaggcgtgcaccaccacacccagctaatttttgtattttcatttcagatgggattttgccatgttggccatgaacacctgtcctcaagctatccactgcctcagcctcccaaagtgctgggattataggcatgagctaccgtgcccagccaccctggaaaaattttacaaaatgaagtataaaaagaagaaaagaggggcgggcatggtgccttgtgcgtgtaatcctagaactctgcaaagccgaggcaggagatcctttgggtttaggagtttgagaccaacctgcacaacatagcaagaccctatttctacaaaaaatacagacactaggctgggcgtggtggctcacgcctgtaatcccagcactttgggaagctgaggccagcagatcacgaggtcaggagatggagaccatcctggctaacatagtgaaaccctgtctctactaaaaatacaaaaaattagccgggtgtggtggcaggcgcctgtagtcccagctactcaggaggctgaggcaggagaatggcgtgaatccgggaggcggagcttgcagtgagccgagatcgtgccactgcactccagcctgggagacagagcaagactccgtctcaaaaaaaaaaaaattttgctcagtacctggccaaaaaagaagcagctcactccctgtacacagagggtaagagaaaggagatggttgaacttctaaactcgctaaagcaggagaggcaaatgtggaatgtgctcaggaaatatctgtgagatgaatgaatttgagggaagtaaggtactagataattacctgccctacccagaacaaatcctgtgcaacgtttccttgaagagcaggaagtcaggccgggtgctgtggctcacgcctgtaatcccagccctttgggaggccaaagtgtgcgaatcacctgaggtcaggagattgagaccagtctggctaacatggtgaaaccccatctctactaaaatacaaaaattagccgggcgtggtggtgcgtgcctgtagtcccaactacttgggaggctgaggcaggagaattgcttgaacctgggaggcagaggttgcggtgagctgagatcggccactgcactccagactgggtgacagagtgagacatcatctcaaaaaaacaaaaaaaaaagagaaaagcaggaagtctggaaggggtggctactgacatagtgaagcaactagttcaattctacaacttgacaactacccctgtgccaggctgtctacaaggatatttagaatgtgtaagacattccttcaaggaactccaggaacagaggcctgacatgttgcaatgtttagtgtcaagcagtgtactagagacacattatcacactcaaacctcacaacagttctatgaggtaggagttatcactccccttttatagatgaaatagaggcttagagtgattgatttactgaaggtcaaacagccagtaaatggtgtagcaaggattccaaccttgccgtctcactaaractgtacaaaaaaagatacaaacaacagacaaatagttcccaggcgcctcccaagttgccaggcactgcatttacctcactgacccctttgaggttgtggcattgcctccattttctaggtgaggaaataggctgagagctggggttagtctggtcatgactgtgtgtgccactcccaccaaatctcatttgatgtggttcatgaggcaaatggcatggacaacttccttcacatgtccactaagcatatggccttttacaacactttctggtttctgaactactttaaaacctcactgtcctgtgaggaaggaagaacagttattacaatctgcatctggaagccaattgccctttagagatatggctgcaattgcctcactgcctgtgtcatgtgactctccgaggcccttaatgagtaaatgaggggtgctgcaggggagccaagctgaccactcccctccctccagtcctgccaccccactgccagtgtcccaccctccttgcgccctacacttcactggctaataacccccctcactttttcctgtgttgaaggcatcctggataattccccacccacgaatggtccctcctcatctcagagagctctccatgcacacctgttactgtttctgtttttacctgtaaatatctgtgtctgacttccatgcttcatgcacctctatagggcaaagactgtgtcttaaacatcacggtagcctcagcatgttgtgcaatgaaggtttttttgtttttgttctttgttttttttttggtattagctttatttgtatcattttgaaatttttatcaaaaaagcagcgtgcctgctgtggttcccatcctctgggatttaggaatctttacccgattctccatccaagtctgtctttcgtattctaggctcttcctaaagttgtcattcacatataccctccagaattttatagggtgtataatctgtaacaactcggaggaagccaattgccctttagaaatatggctgyaattgcctcacttcctgtgtcatgtgackctcctagtcatcacatgacccatccacattgggaagccagaattacttgcaggagtaacctagtgcctatagctatggcrggtacctgcatccttgtttttgtttagtggatcctctatccttcagagactctggaacccctgtgctcttctcctcatctagtgaccctgaggtgatggagttttcaagtccttccagagaggtaagagagagagctcccaatcagcattgtcacagtgcttctggaatcctggcactggaatttaatgaatgacagactctctttgaatccagggccatcatggctctttgagcaaggcacagatggagggaggggtcgaagttgaaatgggtgggaagagtggtggggagcatcctgatttggggtgggcagagagttgtcatcagaagggttgcagggagagctgcacccaggtgtctgtgggccttgtcctaatgaatgtgggagaccaggccatgggcacccaaaggcagctaagccctgcccgggagagtagttgaggggtggagagggrcttgcttttyagtcattcctcattctgtcctcaggaatgtcccaagccttcgggtagggtaagcatcatggctggcagcctcacaggattgcttctacttcaggcagtgtcgtgggcatcagatgagtgagtcaaggcagtggggaggtagcacagagcctcccttctgcctcatagtcctttggtagccttccagtaagctggtggtagacttttagtaggtgctcaataaatccttttgagtgactgagaccaactttggggtgaggatttttgaaaccgtcttcagtctctccaaacagctgtgtccgttctccacatccttgtcagacctcacctctgcttgtgctccctccctcccaggtggtgcccctgcatccctaaaagcttcagtacagctcggtggtctgtgtctgcaatgccacatactgtgactcttgaccccccgacctttcctgccctaggtrccttcagccgctacaagagcagaagcagtgggcattggatgragctgagtacaggaccatacaggctaattgcaccggcacaggtaaccattacacccttcaccccccgggccaggctgggtcctcctagaggtaaacggtgtcagtgatcaccatggagtttctcccctgggcactgataaccctgtggatgtcctcaggcctgctactgatcctgcagccagaagttccagaaagtgaagggatttggaggggccgtgacagatgcaggtgccctcaacatccttgccctgtcaccccctgcccagaatttgctacttaaatggtacttctctgaagaagatgaggaggaaggggacaggatgacatagagccactgacacttttctttgccaattctttggaccctgacttctgcccatccctgacatttggttcctgtcttaatgccagtgaaataagatttcgccgcctatcatctgctaactgctacggactcaggctcagaaaggcctgcgcttcacccaggtgccagcctccacaggttccaacccaggagcccaagttccttttggccctgactcagacactattaggactggcaagtgataagcagagtcccatactctcctattgactcggactaccatatcttgatcatccttttctgtaggaatcggatataacatcatcygggtacccatggccagctgtgacttctccatccgcacctacacctatgcagacacccctgatgatttccagttgcacaacttcagcctcccagaggaagataccaagctcaaggtaggcattctagctttttcaggccctgagggccctgatgtctgggggttgagaaactgtagggtaggtctgcttgtacagacattttgtcccctgctgttttgtcctgggggtgggagggtgggggctaatggctgaaccggatgcactggttgggctagtatgtgttccaactctgggtgcttctctcttcactacctttgtctctagatacccctgattcaccgagccctgcagttggcccagcgtcccgtttcactccttgccagcccctggacatcacccactyggctcaagaccaagggagcggggaatgggaaggggccactcaagggacagcccrgagacatctaccaccagacctgggccagatacattgtgaagtaagggatcarcaaggatgtgggatcaggactggcctcccctttggccatgctgatctgtgtcccaaccctcaacctggttccacttccagatctgcctgtcctcagctcacctttctaccttctgggcctttcaamcttggryctgtcagtcttgcccactccatcaggcttcctgttctctcggtctggcccactttcttggctggatcaytcatgacctttctcttgccaggttcctggatgcctatgctgagcacaagttacagttctgggcagtgacagstgaaaatgagccttctgctgggctgttgagtggataccccttccagtgcctgggcttcacccctgaacatcagcgagacttcattgcccgtgacctaggtcctacccttgccaacggtactcaccacaatgtccgcctactcatgctggatgaccaacgcttgctgctgccccactgggcaaaggtggtaaggcctggacctccatggtgctccagtgaccttcaaatccagcatccaaatgattggctcccaaacttagagggatttttctacccaactatggatcctagagcaccattccccgggacctccagggtgccatggatcccacagttgggacttgaaacctctctaggctgggggtggtagctcatggctataattccagcactttgggaacccaaggtggktggatcacttgaacctaaggagttcaagatgagcctgggaaacatggtgaaaccctaactctacaaaaaaaaaaatagaaaagttagccgggtgtggtggtggcacgcctatagtcccaagtattctggaggctaaggcgggaggtttagttgagcctagaatttcaggctgcagtgagctatgattgtgccactgtactccagcctgtgtgacagagggagaccctgtctcaaaaacaaaaacaaaaaatccctcccaaaacctctgtagttgcattcttcccaccacctaattcaggattcctacaagaggaactagaagttccagaagcctgtgggcagggtccagggtgacttgttcttcctttgcaggtactgacagacccagaagcagctaagtatgttcatggtattgctgtacattggtacctggactttctggctccagccaaagccaccctaagggagacacaccacctgttccccaacaccatgctctttgcctcagaggcctgtgtgggttccaagttctgggagcagagtgtgcggctaggctcctgggatcgagggatgcagtacagccacagcatcatcacagtaagccaccccagtctcccttcctgcaaaggagacctcagacccattagtagtctcaccaaagactgatagaagcccktcctgtccagctttccccaggtagcctgcccttttgsgcaactctggggaaccatgattccctgtcttgcctttccttcacaggtctgcacacctcattgccccttttgcaactactgaggcacttgcagctgcctcagacttctcagctccccttgagatgcctggatcttcacacccccaactccttagctactaaggaatgtgcccctcacagggctgacctacccacagctgcctctcccacacgtgacccttacctacactctctggggacccccagtgttgcgcctttgtctcyttgcctttgtccttaccctagaacctcctgtaccatgtggtcggctggaccgactggaacccatcattgtagacatcaccaagcacacgttttacaaacagcccatgttctaccaccttggccacttcaggtgagtggagggcgggcacccccattccataccaggcctatcatctcctacatcggatggcttacatcactctacaccacgagggagcaggaaggtgttcagggtggaacctcggaagaggcacacccatccccttttgcgccatggaggcaggaagtgactaggtagcaacagaaaaccccaatgcctgaggctggactgcgatgcagaaaagcagggtcagtgcccagcagcatggctccaggcctagagagccagggcagagcctttgcaggagttatggggtgggtccgtgggtgggcgacttcttagatgagggtttcatgggaggtaccccgagggactctgaccatctgttcccacattcagcaagttcattcctgagggctcccagagagtggggctggttgccagtcagaagaacgacccggacgcagtggcactgatgcatcccgatggctctcctgtnnnnnnnnnnnnnnnnnnnnnnnnnnnnnnnnnnnnnnnnnnnnnnnnnnnnaagacagcgttgggggccttggcaggatcacactctcagcttctcctccctgctccctagctcctctaaggatgtgcctcttaccatcaaggatcctgctgtgggcttcctggagacaatctcacctggctactccattcacayctacctgtggcgtygccagtgatggagcagatactcaaggaggcactgggctcagcctgggcattaaagggacagagtcagctcacacgctgtctgtgactaaagagggcacarcagggccagygtgagcttacagcgacgtaagcccaggggcaatggtttgggtgactcactttcccctctaggyggtgccaggggctggaggcccctagaaaaagatcagtaagccccagtgtccccccagcccccatgcttatgtgaacatgcgctgtgtgctgcttgctttggaaactgggcctgggtccaggcctagggtgagctcactgtccgtacaaacacaagatcagggctgagggtaaggaaaagaagagactaggaaagctgggcccaaaactggagactgtttgtctttcctggagatgcagaactgggcccgtggagcagcagtgtcagcatcagggcggaagccttaaagcagcagcgggtgtgcccaggcacccagatgattcctatggcaccagccaggaaaaatggcagctcttaaaggagaaaatgtttgagcccagtcagtgtgagtggctttattctgggtggcagcaccccgtgtccggctgtaccaacaacgaggaggcacgggggcctctggaatgcatgagagtagaaaaaccagtcttgggagcgtgaggacaaatcattcctcttcatcctcctcagccatgcccagggtccgggtgcctggggcccgagcaggcgttgcccgctggatggagacaatgccgctgagcaaggcgtagcccaccatggctgccagtcctgccagcacagataggatctggttccggcgccggtatggctcctcctcagtctctgggcctgctggtgtctggcgttgcggtggtacctcagctgagggtcaaggaaggaaggtgtgttaggagaactagttcttggatccctgcccactctccccagggctgcccctcccatctgccccttacctccatcccaggggaagtagagactgagaatgtgggtacaataggcacagaggttgtgcagcccacgcaggtggacctgcagcttcccactgggcagctttgcctgcagcagcagggccaagtagctgaagacgaaggcgtccaaggaggcagggctggagcagagagagaagggtgggatggaggagaaccactggggtagaaggggtaaagatggagctggaggaagagtcagccttgggaggtgggctctgggcagcaggcggccaccagggaaggacaggacacacagttctagacctggtatggggagagatccccaggtggcgccagcctggccctgaatagggctctatcccagggctgcataaagggcacaytcagtgccccacagctcttcaggcccytcctgtgcctggctgccctcccaccctacccttttgtacctctgagaaggctctggccccacgcacagccccactgtcacyagggccagtwtctrtcycagggacctcctatccagagcctgagccagccccagccccagccccagctccagctgctccatctgaacctgtatcttcttccaagccacccattaccctcttggagtcagactcacgcatctccaaagaagaacttttgagagcccaggcgctgagagagcagggtcagacactcccgagcctctcggtacagctgtaggggcgacacaggtaggcttgcagctgygggaacagtgccacctcyscacctaagcactcccattcctggccagcatccttggggctcatctcatacaatagcccccggtctcagagctacctccttctccagctcttcctcgtcctcaggcctgtgctccccagtcagcagctgtagccgttccatgtactgccgctgcatgcggccaggcaggaagaagttgaggggaaagggcatagcctctgcataccacttccgggtcacttcyacgtagttcttggtgtctatccaaaaagtatgtacctggattgggtrggcaggaagaaacaggyaggtctgagccagtgcacctgtctgattcaaggtgggcttctgacccccatgctttcctgagcctgtgtgtgggtctgwgtgttcccgaaccctccccggctggccatggatgctgggaggtctgggcacactcaccagcaccgggagcaacttctcytccaggagagacatgaaggccagggtgtctgccccttgccgagctgacagatcataatcagcattgtacttctgtggaggaaatatccatggcgtggacactagggagctgcaagggcacttcaccagggaggaaggagtcctgtmtggtacccccctcactggcctctgagtgcagtggaggtacagcaaggaacttttcctgccaaggcccccttgcctgggcccagccagtagcctgttgctgttggcgaaaagcctgggccttggagcctcctggccgtgaaggtccagcgcccaatgcagggaaggaaggaaggctccgccgcaaactaggagcagctcccagaatttccatggaaagctggaacaacgcccgctgacggcaactttctaacagtaacttccccgacccagacaccacaaagctagcacaacggagctcagatgcaggctaggactcggtccatgcctcaggaaccagrgaaagccatcctcacactccctggatccagggaacccacgcccagggccccccagcttgttccctcagtgcccagctcttggctatttctttcacttcattccatcgctcagacaccattaccacatacacattccayccatacccccaggtctcagcctgccctaccttcccaggctccagtccctgttcctcagcatcccccwccacatcctgagtaagctttgtccccagataacctcttcagcatgatccttaaatctccctaagcctyagtttctcccctgtggaatgggggtaagaatctctttctctgaatgcccctgtgttaggaaataatttagaatacttyggaaactggaaaagctctgttcacacctaagcaatcagggcagtggcctcggctctgccaggaacttwggcttttatctggatcctctctttccaggcctctcaattaattccccaggtcctcaacctttgggaagttagaaatgaggaagagtgtcctacttctgacactgttccctcttggaacctgaccgtcaatgctagaagaacccttggaaaacatgctggcccagccctctagttttacaaataagggagtgcacagccctgagaggttacatggcctgcccgagatcacatagtcaatggcagagtaaagagcatagcctaggcctccccactcctctagtaatgctctttcatcttctccaacctggctctaagccttgtccatcctgagccccatatctagcccaacctagtccctgaaaacaggaagtggcccttagaaatctctctccagtcccaccatcagaggccaactgctgtcttccactctccttcagcctgtgctcctctccctccctgcctcacagtgccctaagtttcatctcttgccgactgctttaatacatcacagtgacattgtgtgtgtctctgccacaagactgttgctccttgatgctctgggtcacctgcatctagcatggcatatatctggtgctcaataaatgtgtattgtatagaattgactgaacttctctcactggcagccccctctatccaagtcacctacctcttttcgaaggtgggtgatgatcttgtgtggaactgagatgacctctccatgactggtccgaagggcaggcagagttcctgatattgagagggaagtataccaaccagacccttagctgcctagtcatacatagttgcaacacattcctgcctatttcttgcttctccccttgtacacacccttccttacccccaagggatactgggtacctgaagggctctgccaggggttgctgatcttgtgtaccttcagtggagcaccagtaaatctggcataggtctgcagggaaggaagcagaagtcagagaggcagagccatgtcccccacagtggtatcaagaagagaaataacatttattgaataccttatgtgccattccctatacttagtatcttagtctcgaaaaaaaagggggagtcactaccatttctattttacaaatggacaacacagggctcagagagattccggacatgtctgtgattacaggacagccaggaaaatcctttcctctatctcctctcttgccatctacctggtgaacatctatcctcagaagcttttcctaaccagtatccctcttcttggaagcactgataatgcccttctctttggcagtatctgtggtctgttcctactttaacttatatgtgaatattttattatatttatttgcttacctatctgcctttctgtaaactcgaagggaggaaccaaattttattcatctttgcctggcaatgtttaatatttggaagaaatctaatagatcctctttaaagcaaggagtcaatgaataaatgaagcaaaggaagtctgattgctaagctctttatacaaagcctggctgtgagtcgtttggtctaacaaacaatagcctcagtaaatgctgttaagtgaggaggaagaggagaagggggctgaggagaaggcaggaattccaagctagagtaggtccctgagacagtccagcctagtaaacctccgaatggagaaaaaaaatgcccaaagagaaaggatctccgcaaggtcacacagccagtgaatggatgagcaaggactagaacccatcacctgaactcccaaccaggcgtcttttcattgctgcattaagcctagaaaactacagcatagggcactgaggccatatcggccacgtacgctctttgactgcctcagtttcccccactgcgcccgtgctgagtagccctggcaaggtttggatgcttggctagttcggccccctccccagtcatcagggcacagcagagggcgccggcgccacccctcaccagcacggccaggctgtccaggtccactgacggcagcccccagccccctgaccagcagaacagctccatgggcgccgccatcttgcccaccctctgtcccggaaacacttccttgtgtgcttctgccctcccctgcctgggcccgccccccgccaccgcccctccgatcgttgcggtcagggggcctggggagatccccggggaggcgaggcttcttctggcccgactggcagctgaactgcgggggactgggccgcgggcctcgggggagggcggccgccggcccatccagaggtggcccacgtagcgggacagcgctgtcggcccggcgcgcctcggagagtcacggcgcctcgtccaagtggagccccgaacccctgaaggcgcggcaggctctggagagcggggtcttgtgcgcctgggccaggtctgggggctcttgccaaactgcacgtggcctgtactgctccagggccccttggggctcgtccccgagcggggactgcgggggggtcccccgagcagcatgttttccacagcgcgttatgtttggagcgggccctgcgccgcctgtcgccatggaaacaaaacaggggcggtggcggcggccggagcggaggccgggctggggcttgggtgggggaggggaagagaggctcgcaggctgtcgcttaggtgacgggaactcaggcgcccctctgcttcatccgggtcacggcccgtccgctagtacccacagtgttccacagtctggtccttggctcctcgcctgtacccctggtcttctgcgcctgtccctggtgtccctttcctcttttttggtttcttcactctgacctcactgaccactgctttagattctcccttcagttcccgtcagacgcttccagactcccaagctttcctacgaatgagggaaaatggagaaacaggcacttgtcaggggaccccccaccctaataaagagcacttgctccgccagaacagcaaaattcatgccatgtgggcatccctgggcactatagcaagctagttgcggccactcccttggcatcctttcctgccagctgtggaataatgcccactgtctagcactgcccctgccaggggttcttgccttccacaatcgtggcttccagaaaacagtggcattcggtagcgctgtgtgccgagacccccaacaatgatgactgcggagagggaggcacctgggggaggatcattagggagaggtagaaagcagggaggcctccaggattctttcccagtgcccctggttcccagagctgatgatgcctccagggtgattggcagctctttgtttcagccccccctcacccgcctgctggccccccctccaattctgtccctccgccccccggctcctgctctctccgcctagccttttcccctcccagctgcctgcctgccaggggtagtgagccggctgagaggcatggagacgcaggaacttcggggggccctggctcttctcctcctttgctttttcacatctgccagtcaggatctgcagggtaagcctgtctccatcctcttagaccgctctctgcttcttccccatttgccctcagcccaagtagcagagaacatgtgggcaaggggagaggggaagagtccagaaattgagccagaggaaaacttaagactgcctagagttggtgaaattatggcctggtggagaggagtgggcaccggagagtagtgggggagctggaacaggacagggtcaggcatgaggccagggcagaggactcaggaactggatgctcaggctgcctggctggggtggttcctgagcatctgtaggcaccctagggtctgggagagcagcctgaaggtgggcgtactgtaggtccctgggcttcgtccccctgggctcctggctgcccaaggacagggcgggggtggggaccaagaagcctgggctctcccggaggtctggtggtgggatgggccgatggatgtgggagaggtagctggagcagatgacacaggcatagattctttactggctggagggaaaaccacagattggccaggacacaggaggcagaggagctgggtcctacattcccgtgggagatagcccagatggtgggagggttagagtcctcagtgggcagctgttcttatccagagcgagtgtgctgcgcccctaggatgggaggaggggaactagggtgtggaacgagccaaacccaggagtggaaagagaagctgccttccatttctacgttgtggacaccaggtgccactcctgtgggggatcagcacagcatctcctttgcgccacctggtgggggcatctcaaatttgtggggtgctgtttctgtgtttccaagtgagtctcaaacctgcaggttcctggaaggtagtaataggcaataatggggaaaggaaggcacagtgcctctgtcctctgagagcaacaagggttgaggtttttttttgttttcgttttgtctttttgagatggagtttcactcttgttgcccaggctggagtgcaatggcgcgatctcggctcactgcaacctccacctctcaggttcaagcgagtctcctgcctcagcctcctgagtagctgggattacaggtgcccgccaccacgcccggctaggtggtttttttttcttttttgttgttgtttttgtatttttagtagacacggggtttcaccgtgttggccaggctggtctcgaactcctgaccttaggcgatccacctgcctcaacctcccaaggtgttgggattacaggtgcgagccaccatgcccagccaagggttgaattttgaggtgactaacgctgcctggtggtgggggtagggggtgatgtgggctcgggggagggcataccttagcatttgatcccattctctaaccttgataacccctgcctgaccagtaattgacctgctgactgtgggcgagtctcggcagatggtagctgtggcagagaagatccggacagccttgctcactgctggggacatctacctcttatccaccttccgcctgccccccaagcagggtggtgtcctctttggcctctattctcgccaagacaacactcgatggctggaggcctctgttgtaggcaagatcaacaaaggtgactggtgggcatctcctttcttgcaatggtgacctccttaagcactctccctcatccctacttcccaagtgcttcctcattctccttggcctccactagggaccaaggtcccatcaggctgtgcccagacatcaggggcacctggtatggggtgcttataaggtgctttaggagcccatgtaccaaacaatagggtgaggcttgagtcctgatatttatagggatgggaggttgtacttggggatgcctggaaggagggtgaggcatgtctctgtgcctcagcggtgatacagaaaggtctttcagatccctggaacaggtcagtggccacaaaaccagctgtcaccctaggagaggatacagtcatctgataccaatgaagactaagaaagtatttgtctctaaaccaattatttttttaaatggagtcttgctttgtcacctaggctggagtgcagtggtacaatctcagctcactgcaacctctgcctcctgggttcaagcaattctcctatctcagcctcctgagtagctgggactacaggtgcccaccaccatgcctggctaacttttgtatttttagtagaaacagggtttcgccatgttgaccaggctgttctcgaacttctgacctcaagtgatctgcccaccttggccttctaaagtgctgggattacaggtgtgagccaccgtgcctggcctctaaagcaatttcaaaaacatttattgtgtacctattaaatacaaggtgttgagagccacatagtagaattagggataggggccctagagatgtggtatctagcagagttgatccaaggctcagctgggaggcagggggtgggggatagcgcccatactgatctcccctcctgggcagtactggtgcgataccagcgggaggatggcaaagtccacgccgtgaacctacagcaagcgggcctggctgatgggcgcacacacacagttctcctgcgactccgaggtccctccagacccagccctgccctacatctctacgtggactgcaaactgggtgaccaacatgcaggccttccagcactggcccccattcctccagcggaggtcgatgggctggagattaggactggacagaaggcgtatttgaggatgcaggtgagccgggaggagcctctgagtt

SEQ ID NO: 94435 - DNA, 24305 bp, Homo sapiens
  misc_feature (1)...(24305): n = A,T,C or G
cacccattaccctcttggagtcagactcacgcatctccaaagaagaacttttgagagcccaggcgctgagagagcagggtcagacactcccgagcctctcggtacagctgtaggggcgacacaggtaggcttgcagctgcgggaacagtgccacctccgcacctaagcactcccattcctggccagcatccttggggctcatctcatacaatagcccccggtctcagagctacctccttctccagctcttcctcgtcctcaggcctgtgctccccagtcagcagctgtagccgttccatgtactgccgctgcatgcggccaggcaggaagaagttgaggggaaagggcatagcctctgcataccacttccgggtcacttctacgtagttcttggtgtctatccaaaaagtatgtacctggattgggtgggcaggaagaaacaggcaggtctgagccagtgcacctgtctgattcaaggtgggcttctgacctccatgctctcctgagtctctgtgtgggtctgtgtgtgcccgtcccctccccggctggccatggatgctgggaggtctgggcacactcaccagcaccgggatcaacttctcctccaggagagacatgaaggccagggtgtctgccccttgctgagctgacagatcataatcagcattgtacttctgtggaggaaatatccatggcgtggacgctggggagctgcaagggcacttcaccagggaggaaggagtcctgtctggtacccccctcactggcctctgagtgcagtggaggtacagcaaggaacttttcctgccaaggcccccttgcctgggcccagccagtagcctgttgctgttggcaaaaagcctgggccttggagcccgctggccgtcaaggtcctgggcccattgagaagaaggaagaaaggttgggccgcaaactaggagcagctcccagaatttccatggaaagctggaacaatgcctgctgacagcaactttctaacagtaactttcccgacccagacaccacaaagctagcacaacggagctcagatgcaggctaggactcggtccatgcctcaggaaccagggaaagccatcctcacactccctggatccagggaacccacgcccagggccccccagcttgttccctcagtgcccagctcttggctatttctttcacttcattccatcgcccagacaccattaccacatacacattccatccatacccccaggtctcagcctgccctaccttcccaggctccagtccctgttcctcagcatcccccaccacatcctgagtaagctttgtccccagataacctcttcagcatgatccttaaatctccctaagcctcagtttctcccctgtggaatgggggtaagaatctctttctctgaatgcccctgtgttaggaaataatttagaatacttcggaaacaaaaagctctgttcacacctaagcaatcagggcagtggccctggccttgccaggaacttaggcttttatctggatcctctttccaggcctctcaattaattccccaggtccttaacctttgggaaattagaaattaggaagagtgtcccacttctgacactgtgttccctcttggaacctgaccgtcaatgctagaagaacccttggaaaacatgctggcccagccctctagttttacaaataagggagtgcacagccctgagaggttacatggcctgcccaagatcacgcagtcaatggcagagtaaagagcatagcctaggcctccccactcctctagtaatgctctttcatcttctccaacctggctctaagccttgtccatcctgagccccatatctagcccaacctagtccctgaaaacaagaagtggcccttagaaatctctctccagtcccactatcagaggccaactgctgtcttccagtctccttcagcctgtgctcctctccctccctgactgacaggcagaaggtactgtgcctctggatatccccacagtgccctgagctgcatctcttgctgactgctttaatacatcacagtgacattgtgtgtgtctctgccaccagactattgctccttgatgctctgggtcacctgcatctagcatggcatatatctagtgctcaataaatgtgtattgtacagaattgactgaacttctctcactggcagccccctctatccaaatcacccacctctttttgaaggtgggtgatgatcttgtgtggtactgaggtgacctctccatgactggtccaaagggcaggcagggttcctgatactgagagaaaagtataccaaccaggaccttagctgcctatccatacgtagttgcaacacattcctgcctatctcctgcttctcctcttgtacacacccttcctcacccccaagggatactgggtacctgaagggctctgccaggggttgctgatcttgtgctatatggtgcacaagaaacttttaagaaaaaagaaactttcaagacacactttccaaccacgaattctatctctgctccttttcatagcaataggttttctttttcttccctccacacttaaacatccattctcttatcacccacccccatcagactccttcccctgtgtttcttcagccactgctctgaccaaaatttgagtgaccaaaagtggtgtcagacccagtgaccatttctctgcctgcatttcacttgaccttgaagcagcaattaatctccataatcagcatcttcttgaatttttccctttgaggacattgctcttctactttgtgctctggttatcctttacaaacttttacacctctcctgaactggttaacagtagagggccccaagggtctcacgtaagccttctttgtttttgttttttttcttttcttttattttttatatatttttttgagacggagtcttgctctgttgcccgggctggagtgcagttgcacgatctcggctcactgcaagctctgcctcccaggttcatgctattctcctgcctcagcctcccgagtagctgggactacaggtgcctgccaccatgcctggctaattttctgtatttttaacagagacagggtatcaccatgttagccaggatggtctcgatctcctgacctcgtgatctgcccacctcagcctcccaaaatgctgggattacaggcgtgagccactgctcccagccgtcatttttattttattttatttatttttttgagatggagtcttgctcttttgccaggctggagtgcatggtgcgatctcggctcattgcaacccccgcctcccaggttcaagcgattctcctgcctcagcctcctgagtggctgggactacaggtgcctgtcaccatgcctggctaattttctgtatttttagttgagacaggttttcaccttgttagccaggatggtctcgatctgctgacctcgtgatctgcctgcgtcggcctcccaaagtgctgggattacaggcatgagccactgcacccggccatcaattttttttttttttaaatggagtcttgctctgtcacccaggttggagtgtaacagtgcaatcttggctcattgcaacctccgcctcttgggttcaagcgattctcctgcctcagcctcctgagtagctgggactacaggtgcatgccaccacacccggctagtttttgtatttttagtagagacggggtttcaccatgttgtccaggatggtctcaaactcctgacctcaaatgatgtgcctgccttgaccttccaaagtgctgggattagaggcgtgaaccacattgcccaccgtaagccctcttttctacttccactctttctgtaggtggccctactactaacgtccatggctttaagtaccatctttctatgtgttaatgcataagtccagccttgacctctcttgagcgccatccaactcagcatatctggttggatgtctaatgagtatttcaaattcaacatggccacaactgaactaactgaactcttttttttttttaggcagagttttgctcttgttgcccaggctggagtgcaatggcgagatcttggctcactgcaacctctgcctccagggttcaagcgattctcctgcctcagcctcccgagtagatgggattataggccccgctacccggctaatgtttttgtatttttagtagagacagggtgttgccatattgaccaggctggtctgcaaatcctgacctcaggtgatccccctgcctcggcctcccaaagtgctggaattacaggcgtgagtcactgcgcccggccacacaactgagctcttcattcccaccccagcaccggttatttttccactgttcccatctcaatggcacctccattacccatttgcacattccaaaagcccaggaaccatggtgacttcttttcccatatccaacacaaccaatcctatcttgaattcatccacgtcccaccacctccccagctacctagttccagccaccctctctccacaacctctgaatcaatctttcacttttcccagcaatccattctccactcagcaaaatgatgataaagcacgtcacatcaaggctctgcctcaatttaatggcttcccattgtatttagaatcatctccaagctctcagagactatggtcagctacaatctggcccaccttctgttccagccaaatttcctcacagcacaaggacgtttgcacctgctattttccaagcacgaaaccctcgggcagatatatctggtgctgtcacctaatttcaggttttaactccactctcaccatttcagtgaggacctaatccccatcgcagtcattctatcacatagctttattttattttattttatttttttttgagatacagtctggctctctcacccaggctggagtgcagtggtgtgatctgggctcactgcaaacttccatctcctgcgttcaagcgattctcctgcctcagcttcccgagtagctgggattacaggtgtctgccatcacgcctgactaagttttgtattttcagtagagacggggttttgccatgttagccaggctggtctcgaactccttgacctcaagtgatccacctgcctcagcctcccacaatgttggatttacaggcgtgagccactgctcccggccacatagccatgttttaagcatgtatcactatctaaaattattttttgtttatacgtttgtgtcgtcctgtagaatgtaaggtcacaagatcagggacttgctcattgcactgggtctaacacacagtgcttcctcaacaaacactcgttaagatactaacgtggcagagtggggccttgtaaacagtttcaggaccctgtgcttgtaagagcaacgtggtgccctcccaaggaagacagggaggatgcaggagcactgcccagagatggcgtcaggctgcaagacatcttgaataattcaccatcgtaacaacccagcctcaggaagagatggggcaaggccagaacgaaacattaggtaagaggcggtggacaatgggattcccacagggcagcttttgggcactggacgttccctaacctgaggctctctgaagaggaaggttaggaatcctctcagcttcggtgggctggactcactgtgggaattcaatcgccccccccacccactaagggtgtgctggcgggaaagcgctgagacgcatgcgtagttctcgcgtctggcacccgctccctttccaatacgcttgcgccccatctgtgctacggatggtcagggagagttgtccgtcttcaaatggaccaatgagacttgtggaggggctctgagtcccgcctctggatgagtgaccgtctcttttccaagtgaggccccgccccgcctccccagggctgcttttctcgcggcacgggtggtggggctgcttcttgacttccgcgcctagtgcgcggggccccattctccagtcccgcccacgcgcctttggaggctgcggtgggatttccttttgccttcggttggggctgctgtttctcttcgccgacggtaggcattataaatatttcgccctttgaattttagctctcccctcccggcgttcgcacttagcctttttcatcattatcattatttttaatggtaaggatggtcaaattttactaatgaagcgattataaaatcttcaagtctttgtatccacttgctttttgagggctggagtgggaagaaaggtatataattcattcattcttcggacatgtgacaaacgttcacggagcgcggcaacgagcgccggtgtcgcgatgcgcactggggctgcacatgggagccaggatggactggactggtccctgccctgcccgctgacgattggcaggccactgcctttgatgagctgggcgctataactgccattaagccatttgtacaattaatcacaacagtgataagagcgacaaaggagctattcgggtggctgaggcgggaggatcttttgagccyaggagttcgagaccagcctggggaatagagcgagatcctgtctcaaaaaaagggggagaaaaagtgacaaagaagttgtgagggctatgagtttgcgttagaggaggtgtgtgaggtggggaggcggcagggggcgcggttgttcttagagaaagtgacatccgggctaattttgaaagaataagtgttaactaggctaagcggtgggaaagagtagtgtgtgctgaaggaagggaagaggaacctggcaagttcatggcaggctgtaattggatgctggtctccctccacacttgactcctacagtctgatttctacacagcacccaaagtgatctcttaaaaatacacatgtgatcttgtcacttcccagcaccaaactctacagtgaatttccatcttagaacaaaattcagactccttaccatggccaccaagaccctacacaatctggcctcccaatttccttttccaaggtcaccttttaccactatccatctcactcacactgctccagcactctctatgcttttatttttctttcttcctctttctttctttctttctttttctttttctttctttctttccttccttctctctctctctctttcttttcttttctctttctttttttttttttgagatgcagtcttgctctgtcacccaggtggtgtgatcttggctcactgcaacccagagcagtgggggtgatcttggctcactgcagcctccgccttccaggttcaagcaattctgcctcagcctcctgagtagcagggattagcgccatcagtcccagctaatttttgtatttttagtagagatttcatcatgttgtccaggctggtctcgaactcctgacttcaagtgatctgcccatctcagcctcctaaagtgctgagattacaggcaggagccaccacacctggctcagtatttgttttatttttgttgtgtttatttatttagagacaaggtcttgctctgttgctcaggctggagtgctgtggcaggaacacagctcactgcagcctccactacctcaattcaggcgatcctcccacctcagctgagactacaggtgtgcatcaccatgcctggttaattttttcgttttaccatgttggccaggtttgtctcgaactcttgggctctgctgtcctcctaccttagcctcccaaagtgctaggattgtaggcgtgagccactgtgcccagctggtgttcagtatttgaatccatatttcctgtagccgcaaccaaagttccactgttaggtctcactttgactttaataattgtgttcaggctgggcacactggctcaagcctgtaatctcagcagtttgggaggccgaggtgggtggatcacatgaggtcaggtgtttgagaccagcctgtccaacatggcgaaaccctgtctctactaaaaatacaaaacattctccgatcgtagtggcgggcgcctgtaatcccagctacttgggaggctgaagcaggagaattgcttgaacctgggaggcagaggttgcagtgagcggagatcacgtcattgcactccagcctgggctacagagcgagactctgtctcaataagtaaataaataaataaataaataaataaataaataaataaataattgtgttcggagtcagcatcattcttcctgaagttcaccactcctttgccaagaacacttcctgaaacactgacaagcaggaccttgaatartggggtatggttggtaacaactcactcattcaacaaacattgagcacctattttgtgcttgcctctaaatgaagagctggttgtattatttatttttttaggtgacagggctttccctatgttgcccaggttcgtctcaaactcctgggctcaaaagatcctcatcttctcaagtggttgaatatacacgctccagcgaccatgcctggctgaatgaagagctttgagattttgaagaaacaggaaccatgaaatttgctttgcaactgtttgcaacctttaaggaagactgaaaaggcattcctgaagcatgtgagaagcagtctgtgtgacctgatgactcagaactgcttggaatttagattaggacagatatgagcttaggcttcactctgccacatatttaacttctctaagtcttagttttcttttctttttttttttttttgagatggagtctcgctctgtcacccaggctggagtgcagtggcacgatcttggctcactgcaagctccgcctcccgggttcacgccatcctcctgcctcagccacccgagtagcggggactacagtcgcacaccgccacgcctggctaaatttttgtatttttagtagagacggggtttcaccgtgttagccaggatggtctcgatctcctaaccttgtgatccgcccgcttcggcctcccaaagtgttgggattacaggtgtgagccatcgcgtctggcctctaagtcttaattttcttatctgtaatgtagagttgtcaggctagtgcatgtaataagcactcatgaaagactgactattatcttgcgaaaaattggaagagatcatgaggtacaaggaccttccatctgcactgggctgtacattgaatgttgtggttactgttgaagcattggtaaatcacatgaatccaatggtaaaaccacaccctaaggtcagactcagtggctcacgcctgtaattccagcactttgggaaaccaaggcaagaggattgcttgagctcaggagttcgataccagtctaggcaacctgtttctataaaaagttaaaaaattagcttggtgtggtggtgtgcacttctggtcccagctactcaggaggctaaggtgggaggatcccttgagcccaggtggtcgaggctgcagtgagccaggatcacaccattgcattccagcctggatgacagtgtgaggccctgtcttaaaaaagacaaaaacaaaccaaaaaaacccacaccctagtgggtaaggggcagcagaggtcccacccaagagtgaaatcatttttggtgtcagtaatcagggagagtaatataccctcaggccagaaactagaggtgagtgatggctcacgcctataatcccagcaccttgggaggctgaggcaggtggattgcttgacctcaggaattcgagaccagcctgggcaacatagsaagaccccatctctaaaaataaatttcaaaaattagttgggcatggtggcatgtacctgtagtcccagctactatggaggctgaggtgggaggatccaattgagcctgagaggtcaaagctgcagtgaattgtgattgtgccaagaccctgtctctaaaataaaataaaattacaattaaaaactagagctgaaaggacaggttctaggttaactggtagtagttgttcattcatctgtataaaaagtacttttttgagcacctactctgtgctgtgcatggaatgaacaaatgtctttatttgacttgaacacagaccatagaagtaactaacagtggaactgggagtggcactctccatgggacctaaagacctaggagcctgtgatatgatacctgtcagtgtgaaagggctggagtttgctatctgagccagacctacactccaagacaggtcttgctgggatgggatcaaaattgctgctgggtcagccgaactatttttgtacttctgcttttcacttatatttatgtcttccctaggtatatagctgtctttttttgtttgcttgtttttctgagtcagagtcttgctctgtcactcaggctggagtgcagtggcgcgtctcggctcactgcaacatccacctcgggttcaaacgattctcctgcctcagattcccgagtagctaggattacaggtgcccaccaccatgcccggctaattttttgtatttttaatagagatggggtttagtagagacagggtttcactgtgttatccaggatggtctccatctcctgacctcgtgatctgcccgcctcagcttcccaaagtgctgggattacaggcatgagccactgcgcccggccactggagaccccttttctaccaaaaaaaataaaaataaataaataaatatatatatatatttgtaaagacggagtctctctatgttgcccaggctggtcttgaactcctggcctcaagggatcctcttgtctcagcttcttaaaatgatggggttacaggcatgagccaccgtaccaggccttagcaaactctttttcaagtgctatacaaaggggacagaggaacgtgattgtggccacctagtatgcccctattggccactgcagtgaggcctaggtgtttgaagagaggcacctagggtagtggctctcaggcacaccctaggggcattttggaaatttgtggggcatctttaatagagacaatgattaggaggcactttgagaatttagtggatggagcccaggaaaggtagacattctgcaacatgtagtacattcatacacaaggaagaattcactcatttcacctgacttacaaatataaaatcaaatataaatcagtaggactttattataaaatattgcagaaaagtttcacaagaattttttgtagaaaaagcccaatcagggccgggcatggtggctcatgcctgtaatctcaggactttgggaggccgaggcgggtgaatcacctgaggtcaggagtttgggacaagcctggccaacatggtaaaaccccgtcttgactaaaaatacaaaaatcagccaggcatggtggtgtgcgtctgtaatcccaggtactcgggaggctgaggcaggagaatcgcttgaacccaggaggcggggtttgcagtgagccaagatcaagccactgtgctccagcctgggtgaaagagcaagactccgtcgaaagaaagaaaggaagggaggaagggaggaagggagggagggagggagggagggaaagaaagaaaaaagagaagagaggggaggggagggaagaggagaaaagaaggaaggaaggcaggaaggaaggaatccagtcgagatcgttaaatttgttgtaattttgtctttggcacaataaacattagtccttattaaaactaactttacttagaaaataaaatagaaaatcctcaaggacaaatcacattgtacaggaaatatgaaatgtgaaataatatccaccttggaaattttttttttttgaaacagagtgttactctgtctcccaggctggagtgcagtggcacaatcttgggtctctgcaacctctgactcctgggttcaagtgattctcgtacctcagcttcccaagtagctgggattacaggcgtgcaccaccacacccagctaatttttgtattttcatttcagatgggattttgccatgttggccatgaacacctgtcctcaagctatccactgcctcagcctcccaaagtgctgggattataggcatgagctaccgtgcccagccaccctggaaaaattttacaaaatgaagtataaaaagaagaaaagaggggcgggcatggtgccttgtgcgtgtaatcctagaactctgcaaagccgaggcaggagatcctttgggtttaggagtttgagaccaacctgcacaacatagcaagaccctatttctacaaaaaatacagacactaggctgggcgtggtggctcacgcctgtaatcccagcactttgggaagctgaggccagcagatcacgaggtcaggagatggagaccatcctggctaacatagtgaaaccctgtctctactaaaaatacaaaaaattagccgggtgtggtggcaggcgcctgtagtcccagctactcaggaggctgaggcaggagaatggcgtgaatccgggaggcggagcttgcagtgagccgagatcgtgccactgcactccagcctgggagacagagcaagactccgtctcaaaaaaaaaaaaattttgctcagtacctggccaaaaaagaagcagctcactccctgtacacagagggtaagagaaaggagatggttgaacttctaaactcgctaaagcaggagaggcaaatgtggaatgtgctcaggaaatatctgtgagatgaatgaatttgagggaagtaaggtactagataattacctgccctacccagaacaaatcctgtgcaacgtttccttgaagagcaggaagtcaggccgggtgctgtggctcacgcctgtaatcccagccctttgggaggccaaagtgtgcgaatcacctgaggtcaggagattgagaccagtctggctaacatggtgaaaccccatctctactaaaatacaaaaattagccgggcgtggtggtgcgtgcctgtagtcccaactacttgggaggctgaggcaggagaattgcttgaacctgggaggcagaggttgcggtgagctgagatcggccactgcactccagactgggtgacagagtgagacatcatctcaaaaaaacaaaaaaaaaagagaaaagcaggaagtctggaaggggtggctactgacatagtgaagcaactagttcaattctacaacttgacaactacccctgtgccaggctgtctacaaggatatttagaatgtgtaagacattccttcaaggaactccaggaacagaggcctgacatgttgcaatgtttagtgtcaagcagtgtactagagacacattatcacactcaaacctcacaacagttctatgaggtaggagttatcactccccttttatagatgaaatagaggcttagagtgattgatttactgaaggtcaaacagccagtaaatggtgtagcaaggattccaaccttgccgtctcactaaractgtacaaaaaaagatacaaacaacagacaaatagttcccaggcgcctcccaagttgccaggcactgcatttacctcactgacccctttgaggttgtggcattgcctccattttctaggtgaggaaataggctgagagctggggttagtctggtcatgactgtgtgtgccactcccaccaaatctcatttgatgtggttcatgaggcaaatggcatggacaacttccttcacatgtccactaagcatatggccttttacaacactttctggtttctgaactactttaaaacctcactgtcctgtgaggaaggaagaacagttattacaatctgcatctggaagccaattgccctttagagatatggctgcaattgcctcactgcctgtgtcatgtgactctccgaggcccttaatgagtaaatgaggggtgctgcaggggagccaagctgaccactcccctccctccagtcctgccaccccactgccagtgtcccaccctccttgcgccctacacttcactggctaataacccccctcactttttcctgtgttgaaggcatcctggataattccccacccacgaatggtccctcctcatctcagagagctctccatgcacacctgttactgtttctgtttttacctgtaaatatctgtgtctgacttccatgcttcatgcacctctatagggcaaagactgtgtcttaaacatcacggtagcctcagcatgttgtgcaatgaaggtttttttgtttttgttctttgttttttttttggtattagctttatttgtatcattttgaaatttttatcaaaaaagcagcgtgcctgctgtggttcccatcctctgggatttaggaatctttacccgattctccatccaagtctgtctttcgtattctaggctcttcctaaagttgtcattcacatataccctccagaattttatagggtgtataatctgtaacaactcggaggaagccaattgccctttagaaatatggctgyaattgcctcacttcctgtgtcatgtgackctcctagtcatcacatgacccatccacattgggaagccagaattacttgcaggagtaacctagtgcctatagctatggcrggtacctgcatccttgtttttgtttagtggatcctctatccttcagagactctggaacccctgtgctcttctcctcatctagtgaccctgaggtgatggagttttcaagtccttccagagaggtaagagagagagctcccaatcagcattgtcacagtgcttctggaatcctggcactggaatttaatgaatgacagactctctttgaatccagggccatcatggctctttgagcaaggcacagatggagggaggggtcgaagttgaaatgggtgggaagagtggtggggagcatcctgatttggggtgggcagagagttgtcatcagaagggttgcagggagagctgcacccaggtgtctgtgggccttgtcctaatgaatgtgggagaccaggccatgggcacccaaaggcagctaagccctgcccgggagagtagttgaggggtggagagggrcttgcttttyagtcattcctcattctgtcctcaggaatgtcccaagccttcgggtagggtaagcatcatggctggcagcctcacaggattgcttctacttcaggcagtgtcgtgggcatcagatgagtgagtcaaggcagtggggaggtagcacagagcctcccttctgcctcatagtcctttggtagccttccagtaagctggtggtagacttttagtaggtgctcaataaatccttttgagtgactgagaccaactttggggtgaggatttttgaaaccgtcttcagtctctccaaacagctgtgtccgttctccacatccttgtcagacctcacctctgcttgtgctccctccctcccaggtggtgcccctgcatccctaaaagcttcagtacagctcggtggtctgtgtctgcaatgccacatactgtgactcttgaccccccgacctttcctgccctaggtrccttcagccgctacaagagcagaagcagtgggcattggatgragctgagtacaggaccatacaggctaattgcaccggcacaggtaaccattacacccttcaccccccgggccaggctgggtcctcctagaggtaaacggtgtcagtgatcaccatggagtttctcccctgggcactgataaccctgtggatgtcctcaggcctgctactgatcctgcagccagaagttccagaaagtgaagggatttggaggggccgtgacagatgcaggtgccctcaacatccttgccctgtcaccccctgcccagaatttgctacttaaatggtacttctctgaagaagatgaggaggaaggggacaggatgacatagagccactgacacttttctttgccaattctttggaccctgacttctgcccatccctgacatttggttcctgtcttaatgccagtgaaataagatttcgccgcctatcatctgctaactgctacggactcaggctcagaaaggcctgcgcttcacccaggtgccagcctccacaggttccaacccaggagcccaagttccttttggccctgactcagacactattaggactggcaagtgataagcagagtcccatactctcctattgactcggactaccatatcttgatcatccttttctgtaggaatcggatataacatcatctgggtacccatggccagctgtgacttctccatccgcacctacacctatgcagacacccctgatgatttccagttgcacaacttcagcctcccagaggaagataccaagctcaaggtaggcattctagctttttcaggccctgagggccctgatgtctgggggttgagaaactgtagggtaggtctgcttgtacagacattttgtcccctgctgttttgtcctgggggtgggagggtgggggctaatggctgaaccggatgcactggttgggctagtatgtgttccaactctgggtgcttctctcttcactacctttgtctctagatacccctgattcaccgagccctgcagttggcccagcgtcccgtttcactccttgccagcccctggacatcacccactyggctcaagaccaagggagcggggaatgggaaggggccactcaagggacagcccrgagacatctaccaccagacctgggccagatacattgtgaagtaagggatcarcaaggatgtgggatcaggactggcctcccctttggccatgctgatctgtgtcccaaccctcaacctggttccacttccagatctgcctgtcctcagctcacctttctaccttctgggcctttcaamcttggryctgtcagtcttgcccactccatcaggcttcctgttctctcggtctggcccactttcttggctggatcaytcatgacctttctcttgccaggttcctggatgcctatgctgagcacaagttacagttctgggcagtgacagstgaaaatgagccttctgctgggctgttgagtggataccccttccagtgcctgggcttcacccctgaacatcagcgagacttcattgcccgtgacctaggtcctacccttgccaacggtactcaccacaatgtccgcctactcatgctggatgaccaacgcttgctgctgccccactgggcaaaggtggtaaggcctggacctccatggtgctccagtgaccttcaaatccagcatccaaatgattggctcccaaacttagagggatttttctacccaactatggatcctagagcaccattccccgggacctccagggtgccatggatcccacagttgggacttgaaacctctctaggctgggggtggtagctcatggctataattccagcactttgggaacccaaggtggktggatcacttgaacctaaggagttcaagatgagcctgggaaacatggtgaaaccctaactctacaaaaaaaaaaatagaaaagttagccgggtgtggtggtggcacgcctatagtcccaagtattctggaggctaaggcgggaggtttagttgagcctagaatttcaggctgcagtgagctatgattgtgccactgtactccagcctgtgtgacagagggagaccctgtctcaaaaacaaaaacaaaaaatccctcccaaaacctctgtagttgcattcttcccaccacctaattcaggattcctacaagaggaactagaagttccagaagcctgtgggcagggtccagggtgacttgttcttcctttgcaggtactgacagacccagaagcagctaagtatgttcatggtattgctgtacattggtacctggactttctggctccagccaaagccaccctaagggagacacaccacctgttccccaacaccatgctctttgcctcagaggcctgtgtgggttccaagttctgggagcagagtgtgcggctaggctcctgggatcgagggatgcagtacagccacagcatcatcacagtaagccaccccagtctcccttcctgcaaaggagacctcagacccattagtagtctcaccaaagactgatagaagcccktcctgtccagctttccccaggtagcctgcccttttgsgcaactctggggaaccatgattccctgtcttgcctttccttcacaggtctgcacacctcattgccccttttgcaactactgaggcacttgcagctgcctcagacttctcagctccccttgagatgcctggatcttcacacccccaactccttagctactaaggaatgtgcccctcacagggctgacctacccacagctgcctctcccacacgtgacccttacctacactctctggggacccccagtgttgcgcctttgtctcyttgcctttgtccttaccctagaacctcctgtaccatgtggtcggctggaccgactggaacccatcattgtagacatcaccaagcacacgttttacaaacagcccatgttctaccaccttggccacttcaggtgagtggagggcgggcacccccattccataccaggcctatcatctcctacatcggatggcttacatcactctacaccacgagggagcaggaaggtgttcagggtggaacctcggaagaggcacacccatccccttttgcgccatggaggcaggaagtgactaggtagcaacagaaaaccccaatgcctgaggctggactgcgatgcagaaaagcagggtcagtgcccagcagcatggctccaggcctagagagccagggcagagcctttgcaggagttatggggtgggtccgtgggtgggcgacttcttagatgagggtttcatgggaggtaccccgagggactctgaccatctgttcccacattcagcaagttcattcctgagggctcccagagagtggggctggttgccagtcagaagaacgacccggacgcagtggcactgatgcatcccgatggctctcctgtnnnnnnnnnnnnnnnnnnnnnnnnnnnnnnnnnnnnnnnnnnnnnnnnnnnnaagacagcgttgggggccttggcaggatcacactctcagcttctcctccctgctccctagctcctctaaggatgtgcctcttaccatcaaggatcctgctgtgggcttcctggagacaatctcacctggctactccattcacacctacctgtggcgtcgccagtgatggagcagatactcaaggaggcactgggctcagcctgggcattaaagggacagagtcagctcacacgctgtctgtgactaaagagggcacaacagggccagtgtgagcttacagcgacgtaagcccaggggcaatggtttgggtgactcactttcccctctaggtggtgccaggggctggaggcccctagaaaaagatcagtaagccccagtgtccccccagcccccatgcttatgtgaacatgcgctgtgtgctgcttgctttggaaactgggcctgggtccaggcctagggtgagctcactgtccgtacaaacacaagatcagggctgagggtaaggaaaagaagagactaggaaagctgggcccaaaactggagactgtttgtctttcctggagatgcagaactgggcccgtggagcagcagtgtcagcatcagggcggaagccttaaagcagcagcgggtgtgcccaggcacccagatgattcctatggcaccagccaggaaaaatggcagctcttaaaggagaaaatgtttgagcccagtcagtgtgagtggctttattctgggtggcagcaccccgtgtccggctgtaccaacaacgaggaggcacgggggcctctggaatgcatgagagtagaaaaaccagtcttgggagcgtgaggacaaatcattcctcttcatcctcctcagccatgcccagggtccgggtgcctggggcccgagcaggcgttgcccgctggatggagacaatgccgctgagcaaggcgtagcccaccatggctgccagtcctgccagcacagataggatctggttccggcgccggtatggctcctcctcagtctctgggcctgctggtgtctggcgttgcggtggtacctcagctgagggtcaaggaaggaaggtgtgttaggagaactagttcttggatccctgcccactctccccagggctgcccctcccatctgccccttacctccatcccaggggaagtagagactgagaatgtgggtacaataggcacagaggttgtgcagcccacgcaggtggacctgcagcttcccactgggcagctttgcctgcagcagcagggccaagtagctgaagacgaaggcgtccaaggaggcagggctggagcagagagagaagggtgggatggaggagaaccactggggtagaaggggtaaagatggagctggaggaagagtcagccttgggaggtgggctctgggcagcaggcggccaccagggaaggacaggacacacagttctagacctggtatggggagagatccccaggtggcgccagcctggccctgaatagggctctatcccagggctgcataaagggcacattcagtgccccacagctcttcaggcccctcctgtgcctggctgccctcccaccctacccttttgtacctctgagaaggctctggccccacgcacagccccactgtcaccagggccagtatctgtctcagggacctcctatccagagcctgagccagccccagccccagccccagctccagctgctccatctgaacctgtatcttcttccaagccacccattaccctcttggagtcagactcacgcatctccaaagaagaacttttgagagcccaggcgctgagagagcagggtcagacactcccgagcctctcggtacagctgtaggggcgacacaggtaggcttgcagctgtgggaacagtgccacctccccacctaagcactcccattcctggccagcatccttggggctcatctcatacaatagcccccggtctcagagctacctccttctccagctcttcctcgtcctcaggcctgtgctccccagtcagcagctgtagccgttccatgtactgccgctgcatgcggccaggcaggaagaagttgaggggaaagggcatagcctctgcataccacttccgggtcacttccacgtagttcttggtgtctatccaaaaagtatgtacctggattgggtaggcaggaagaaacaggtaggtctgagccagtgcacctgtctgattcaaggtgggcttctgacccccatgctttcctgagcctgtgtgtgggtctgtgtgttcccgaaccctccccggctggccatggatgctgggaggtctgggcacactcaccagcaccgggagcaacttctcctccaggagagacatgaaggccagggtgtctgccccttgccgagctgacagatcataatcagcattgtacttctgtggaggaaatatccatggcgtggacactagggagctgcaagggcacttcaccagggaggaaggagtcctgtatggtacccccctcactggcctctgagtgcagtggaggtacagcaaggaacttttcctgccaaggcccccttgcctgggcccagccagtagcctgttgctgttggcgaaaagcctgggccttggagcctcctggccgtgaaggtccagcgcccaatgcagggaaggaaggaaggctccgccgcaaactaggagcagctcccagaatttccatggaaagctggaacaacgcccgctgacggcaactttctaacagtaacttccccgacccagacaccacaaagctagcacaacggagctcagatgcaggctaggactcggtccatgcctcaggaaccagagaaagccatcctcacactccctggatccagggaacccacgcccagggccccccagcttgttccctcagtgcccagctcttggctatttctttcacttcattccatcgctcagacaccattaccacatacacattccacccatacccccaggtctcagcctgccctaccttcccaggctccagtccctgttcctcagcatccccctccacatcctgagtaagctttgtccccagataacctcttcagcatgatccttaaatctccctaagcctcagtttctcccctgtggaatgggggtaagaatctctttctctgaatgcccctgtgttaggaaataatttagaatactttggaaactggaaaagctctgttcacacctaagcaatcagggcagtggcctcggctctgccaggaactttggcttttatctggatcctctctttccaggcctctcaattaattccccaggtcctcaacctttgggaagttagaaatgaggaagagtgtcctacttctgacactgttccctcttggaacctgaccgtcaatgctagaagaacccttggaaaacatgctggcccagccctctagttttacaaataagggagtgcacagccctgagaggttacatggcctgcccgagatcacatagtcaatggcagagtaaagagcatagcctaggcctccccactcctctagtaatgctctttcatcttctccaacctggctctaagccttgtccatcctgagccccatatctagcccaacctagtccctgaaaacaggaagtggcccttagaaatctctctccagtcccaccatcagaggccaactgctgtcttccactctccttcagcctgtgctcctctccctccctgcctcacagtgccctaagtttcatctcttgccgactgctttaatacatcacagtgacattgtgtgtgtctctgccacaagactgttgctccttgatgctctgggtcacctgcatctagcatggcatatatctggtgctcaataaatgtgtattgtatagaattgactgaacttctctcactggcagccccctctatccaagtcacctacctcttttcgaaggtgggtgatgatcttgtgtggaactgagatgacctctccatgactggtccgaagggcaggcagagttcctgatattgagagggaagtataccaaccagacccttagctgcctagtcatacatagttgcaacacattcctgcctatttcttgcttctccccttgtacacacccttccttacccccaagggatactgggtacctgaagggctctgccaggggttgctgatcttgtgtaccttcagtggagcaccagtaaatctggcataggtctgcagggaaggaagcagaagtcagagaggcagagccatgtcccccacagtggtatcaagaagagaaataacatttattgaataccttatgtgccattccctatacttagtatcttagtctcgaaaaaaaagggggagtcactaccatttctattttacaaatggacaacacagggctcagagagattccggacatgtctgtgattacaggacagccaggaaaatcctttcctctatctcctctcttgccatctacctggtgaacatctatcctcagaagcttttcctaaccagtatccctcttcttggaagcactgataatgcccttctctttggcagtatctgtggtctgttcctactttaacttatatgtgaatattttattatatttatttgcttacctatctgcctttctgtaaactcgaagggaggaaccaaattttattcatctttgcctggcaatgtttaatatttggaagaaatctaatagatcctctttaaagcaaggagtcaatgaataaatgaagcaaaggaagtctgattgctaagctctttatacaaagcctggctgtgagtcgtttggtctaacaaacaatagcctcagtaaatgctgttaagtgaggaggaagaggagaagggggctgaggagaaggcaggaattccaagctagagtaggtccctgagacagtccagcctagtaaacctccgaatggagaaaaaaaatgcccaaagagaaaggatctccgcaaggtcacacagccagtgaatggatgagcaaggactagaacccatcacctgaactcccaaccaggcgtcttttcattgctgcattaagcctagaaaactacagcatagggcactgaggccatatcggccacgtacgctctttgactgcctcagtttcccccactgcgcccgtgctgagtagccctggcaaggtttggatgcttggctagttcggccccctccccagtcatcagggcacagcagagggcgccggcgccacccctcaccagcacggccaggctgtccaggtccactgacggcagcccccagccccctgaccagcagaacagctccatgggcgccgccatcttgcccaccctctgtcccggaaacacttccttgtgtgcttctgccctcccctgcctgggcccgccccccgccaccgcccctccgatcgttgcggtcagggggcctggggagatccccggggaggcgaggcttcttc

SEQ ID NO: 94436 - DNA, 35574 bp, Homo sapiens
  misc_feature (1)...(35574): n = A,T,C or G
tttaaaaaataaaaatttcagccaggtgtggtggctcatgcctgtaatcccagcactttgtgaggccaaggcgagcagatcacttgaagtcaggagttcgagaccagccggccaacatggtgaaaccctgtctctacgaaaaatattaaaaattagacaggcatsgtgrcgtgcacctgtaatcccagctactcaggaggctgaggcaggagaattgcttgaacccaggaggtggaggttgcagtgagctaacgccactgcactccagcctcagcaacacaatgagattctctctcaagaaaaaaattaaaaaaaaaaaaaagtggctactctttctctctcagaaagatgagtaaacctctatcctatcctattctttttaccttttttttttttttttttttggtagagacggaggtctcactatgttgccaaggctggtctcaaactctcctccagtgattctctagcctcagcctcccaaagcgctgatattgcaggtgtgagccacagcgcctggccccctatcctttttaatggcttatttaggagtgccatacttaatttgggcaatctcccatacatgtacatttatttccaatactggagtctgttccagagggatctgctttctgcatctatcaggggggtggaaatcctggaggctgccaagtataaacgagtatttggaaaacagctgccccagaggcacactagaccttctcaaaatcctccctactgcttggagttgctccacgccagggtaatccagacctgctggaacagccctgatacggtttggctgtgtcccccccagatctcatcttgaattgtaatccccatatatcatgggagggtttaatcaaatcatgggaggtaattttccccaggctgttctcatgatggtgacagagttttcttttttttttttttttttgagacggagtcttactctatcgcccaggctggagtgcagtggcacaaccttggctcactgcaagctccgcctcccaggttcaaataattctctgcctcagtctcccgagtagctgggattacaggcacccgccaccacgcctggctaatttttgtatttttagtagagacagggtttcaccaccttggccaggctggtcgtgaactcctgaccttgtgatccacccacctcggcctcccaaagtgctgggactacaggcgtgagccaccacgtctggccaatggtgacagagttttcatgagatctaatggttttataagcatctgccatttcccctgctggcattcattctctctcctgctgccctgtgaagaggtgccttccaccatgattgttaagtttcctgaggcctccccagctgtgagcaactgtgtcaattaaacctcttttctttattaattacmcagtcttgggtattccttcataacagcatgagaacagactaatacgagcccttaccacagttcctatcagaggtttctgagcatggaatagctacaacaagagttctcaaaattcttgggttgggcctaggtaatgaacaccctcctacaagggaagatccatcaactcatgtcactccccatcaagcaaattgctaaactgtcctttgcccaattaagtctcctccaacttatgttaagatgaaatggttcaacaggacttcccccaagcctttcagtaacctcagctctgttatcagcatctgtggggccagctccaggcccccaggattcaacttttcccaattggaacgaaacaatctttcgtgtttttccttctgacagacagggagagagattactgccattagtttgtatgtcaaacagacttatattttcctgcggtttcatgttttgaattttgaaataagttttgtgggtttttctccctctcatacattgagtgctactgcccaatccttctcatgaccataatacgtgtacctcaattttctgtgacctgccaatggactactgggtatgtgtggtaaggggtggggacaagaaaatgttttgttggggcaggcagtttaggtgtgccgaaagaaaggggaacaagttgaatgtccctcattggaaatgcttgggaccagaggtgtttccaatttcagatttttttgtattttggaatatgtgcatatatatgaggtatcttgaggatgggacccaagtctaaaggcgaaattcatttacctttctgtttcagaaaaactgtttttcctctagattccacactaacacaataccaacccagaacactttcgtgtccaaatgtgtagatttcttcccgagagcgagcaagcaatcaattctgcagtgaacaccaattaggtatcctctaattcacttccaacaccatctttctggaaataatatcagatcctgcaggttgaggcctcagtccccaagactgcccccacccacacaccagtagcaagtttagggctccagaacttctgaccaaccagcttcaagttggggttcccaccaccttcgctttgggtttaatttgctggagtggctaacagaactcagtgaaaaatgtttaccagtcttttttttttgagacagcaggtcttgctctgtctcccaggctggagtgcaaactgaacagctgggactgcaagcatgcgccaccactcctggttgttctttttttttctaggagagacaggatctcactatgatgttatcttgaactcccaggctgaagcaatcctcctacctcagcctcccaaagtgctgggattatatgtgtgagccaccacgcccggcctacctggtttatcataaaggatattacgaaggatacagatgaagagatgcgtacaccaaggtatgggataaggggcgcagagcttctgtcccctccctgggcgcaccaccctccaggaacctctacacgtagttcagctatcctgacactctccactgtcctcatgggttttaacgaggctttatgatgtcaccattccttcccccagggtatggggtaggaccttctctgaaatgagggttgtaatctcacctgtaatcccagggctttgggaggccaaggtgggaggatcgcttgagcccaggagttaaaaccagcctgggcaacacagcgagaccccatctctacaaaaaacttaaaaattagccaggcaaggtggctcacatccgtaacaagggctatgggagttatgagccaggaacaaaaaaagaaaacatatacatcataacaccagtttcataaacaccttacagacaaaggctgaaggtaattgtaagcaatattttccacagttttgcacgtgaaacaagtttgtgttaagtactcacatgtggaactttccacttgtggcgtcacgttgggactcttggattttggagtgctttggatttggaatttttggattagggatactcagtctgtattgaaggggtatcaggaagccaatgactagcagagcgtgggactgaggtgctaagaagaggatacaaagacccagggtcaaagtatccgaaaagttcacattgacatctatttcatatccttagtgcactgatttctagcccatgccctcactgtggtattctctctctctctctctctatatatatatatttttttcttttgagacggagtttcactcgttgcccaggctagagtgcaatggtgcaatctcagctcactgcaacctccgcctcccaggttcaagcaattctcctgcctcagcctcctgaatagctgggattacaggtacatgccaccacacccagctaattttttaatttttagtagagatagggtttcaccatgttggccaggctggtctcaaactcctgacctcagatgatctgcctgccctggcctcccaaagtgctgagattacaggcgtgagccacctcgcctggccttattctcaacataattgctggtgaaatactaaccacttacccttttgggttctgttttcatgggaaaaaactttgtttccgatgtgaatgtttttcttcttaatatttttctgtagtgtgtaattttttatagtgatacatttcttttataagaaaaataaagctaaaagaaacaatgttaaataaaaaaaaaaaatccagggttggaaatagaagagacttggaatgaggctggtggcttatgtttggatctccttcccatcctgggcctttatgtaaacaggtttcaaaactctctgagagagaagcgcctagttaaaacaccacacaacacaccctgcctatttcctttactcagcaccatttaatgtattaaaaaacagctttaaaaaaaaaaaaaaaaaaaaaaacttgaaataggaacttcaccgtctcttaagagcgatatatttaatacattcacaagattcgaaatgaaaaacaaacattattcatgctacaggttttaattttccttggacaacaccaaaaacacagtactcaagcggcatgttttttttttgaaaatttggttttgagatggaatttcactcttgtttcccaggctggagtgcaatggtgtgatcttggctcactgcaacctccgcctcccgggttcaagagattcgcctgcctcacaggcgcccaccgccacacctggataatttttgttttttgtttttttttttgagacggtgtctcactctgtcgcccaggttagagtgcagtggcaccatctcagctcactgcaagctccgccttccaggttcatgccattctcctgcctcaggctctcgagtagctgggactacaggcgctcaccaccacgcccgcctaattttttctattttttaatagagacggggtttcacccgtgttagccaggatggtctcgatttcctgacctcgtgatccacccgcctaggcctcccaaagtgctgggattacaggcatgagccgccgcggccggcaatttttgtattttaagtggagatgaggtttcaccatgttagccaggctggtcttcagctcctgacctcaggtgatccatccgccttggtctcccaaaatgctgggattacaggcatgagccactgtgctcggcctgcaggttttaacaagaggagcatgaactatcattttgacacaaagacagcttaaaaaaaataataaagctggctggacgcggtggctcacacctgtaatcccagcactttgggaggctgaggtgggtggatcacaaggtcaggagatcaagaccatcctggacaacatggtgaaaccccgtctccactaaaaacacaaaattagccaggcatggtggcaggcgcctgtaatcccagctactcaggagggtgagccaggagaatcacttgaactcgggaggcagagcttgtagtgagcagagatcgcacctctgcactccagcctgggcaacagagggagactccatccccaaaaaaaaaaaaaaaaaaaaaagactatttgttgaatgttgaaaggaggagctaaaattcggagtagaaggaaaactggagtgtctcattcacttcactctgatttgaatttttttttttttttgagacaagagtattgctctgtcacacaggctggagtacaatggtgcgatatcagctcactgcaatcttcgcctcctgggttcaagtgattctcctgcctcagcctcctgagtagctaggattacaggcatgcgccaccacacccagctaattcttgtattttttagtagaaatggggttttaccatgttggccaggctggtctcgaactcctgacctcaggtgatctgcccacctcgacctcccaaagtgctgggattacaggcgtgagccaccatkcccggcctgattttttttttttttttttttttgaggcagggtcttgctctgtcccccaggctggagtgcagtggcatactcatggctcactgcagcctccaattcctaaactccaatgatcttctcacctcagcctgccaagtagctaggattacagatgtgtgccgccatgctaatttttaaaaattttttgtatagatgggttctcactatgagcccaggctcatcttgaagttctgggctcaagcaatcctcttaccttggcttyccaaagtactgggattacaggcgggagccaccatgccagccgtcactctcatttttgagcacaggaattgtgcccaaaggctaggataaggaattaaagatgcatgccaagaaatacccacaaacattaattataaaagggagactatactaatgtttgtgaaaagcttatactaacatagagcaatatttaagttataaagttaaatgaaaaagggtataaaactgtatgaacagtacaatctcaactatgtaaaaaccaaccaaaatctgccctaaaaaggctggaaggaaatagctcaaaatgttaatgtgattgtatttaagaagtgtatctaatagggatcttttttcttcctttttagttttctgtcttttccaaatgtttctctactggggagatttttttaaaaagctattagggaaggagtagaacaaaagtggaaaaaaaaatctattagttacaaaaaactgagtctgatagaagcattgaatttgagttaatgaatctaagtctagcctataagaatttgtacatttagaaaactatgaaacagtccaggctactccatgaatccattggtaggaccagaggctggaggtggaagtgccacctggtcctgcctgataaaaaatgctgaatcagccaggcacggtggcccacacacctgtaatcccaccaytttgggaggctgaggtgggcggatcacctgaggtcaggagtttgaaaccagcctggccaacatgrcgaaacactgtctctactaaaagtacaaaaattggccagcgtggtggcaggcrcctgtaatcccagctactcaggaggattacgtgaacycaggaggcagaggttgcagtgagccgagatggcgccactgcactccagcctgggtgacaagagtgagactccatctcaaaaaaacaaaacaaaacaaaacaacaacaacaaaaaaacccaaatcaatcaggaatgtcacatatttacaaaaaggaacagaaatactcacatttagcaaaaacttatttgtccattaatactataatcaaacatgcagattttctcgtattttctgtgcggatggcaagttacaaaaatgctattatcacaactgtagaatgtcaatcctagtttagaaacagtaataaaacagcacttcaacaagagtggaccgagaaagtgcacgacttagaaaattataaaaaatgcttcctacaaaaatgattccctttaagacatttgttcactgtacacattttaaggtcccctctcccaccccccaacaaaaatagaggcagaacctctaagcactttctaacaaagtgtcccctggtttgttcctctgacaaaccctgactgaaggctcatgatgtgcaggcactggggtctcaaagaggagaaagacttgtccctgcctcacggatgcctcagtcttcccaaagcaggaggcagacaagtcaccaaccgctacggatgtagaatggatgtattatacatccattaaaagcagatgccaatgccttcttaaaattaaacgatatgctgcaattcccactgaattacttatayaaacctccttacatacaagctgtcctgacttactaggaagcaaaaatgccaccaccttctcctgataaatacttctctaatgggcaggcattaaattacattttgtgatgtttgcccctaaacatcacaatgcctagtgaagtcagttaactttcttttaagcaatggtgcctattttactctgagaatgagacactttgaaactaaggaaggaaccagtcctgtatctagatcaagactcatcagtaccatcaaaagctgagatgaaacagtgtaagtttcaacagaaatcttcaatctcccatccgttgatgtgcaatgcgctcctgtgtcagccrctcchggtctttctrcacatttgggtggtcttccdsatctthstagvgckacctgacgaygtccngtcwcctstmattctmaggcttghmtrggctccggacaacctggaggcrtbvctcttycrsartmywcactggaagggcaaaaaccaaatcctcagtggcagactagggtctcagtacaaggaacgaacaagaggctttgccaacaactacctgtactactgatggatctcactttaggttaaagaaaaaaagtgagtgcatgtatgtggcagtgtgttatgctgatggccccctatggacacctcatggtgttcatgcctctgtagtaatttcaccttgaaatgggctgggcttgtgattgctttaactaactgaatgtsgatgaagcgacactggcaattctaggccgaagccttaaaaaggcctgctgacttctgcttttatacttttgaaagccctgagctaccctgctagagagaccacataaagaggaacaggccctggccaggcatggtggttcatgcctgtgatcccaacactttgggaggccaacgtcagtagatcgcctgagctcaggagttcgagaccagcctggcaacatggcgaaaccccgtctctacaaaatacacaaaaaattagccaggcatggtggcacatgcctgtggtcccagcgactggggaggctgaggtgggaggatcacttgagccctggaggcagaggttgcagtgagctaagatcatgccactgcactccaacctgggtgacagagtgagaccctatcttgaaaaaaaagaaaaaagaaaagagaaaaaaaaaaaagagggacaggcccagcccccagctgccagcaaaaggcagccacaccaacgactaccaccagcagagtaactgcctagctgagcccagcctggactacagaattatgaacaaataaaayggtgggctgggcgcagtggctcacgcctgtaatcctagcactttaggaggctgaggcaggcagactgcctgagctcaagagttyaagatcagcctggtcaacatggtgaaacccccgtctccactaaaatgcaaaaaattagccaggcttggtggtgcacacctgtagtcccagctgctgaagcaggagaatcgcttgaacccgagaggcagaggttgcagtgagccaagatcacacgccactgcactccagcctgggtgacacagtgagactctgtctcaaaaaaaaaaaaaaaggtggttattagttttggggtggtagtcacaaaacacataaccaaaacaatgtgtacttagaaaatctaggccgggcgcggtggctcacgcctgtaatcccagcactttgggaggccgaggcgggcggatcacgaggtcaggagatcgagaccatccyggctaaaacggtgaaaccccrtctctactaaaaatacaaaaaattagcckggcgtagtggygggcgcctgtagtcccagctacttgggaggctgaggcaggagaatggcgtgaacccgggaggcggagcttgcagtgagccgagatcccgccactgcactccagcctgggcgacagagcgagactccgtctcaaaaaaaaaaaaaaaaagaaaatctagtacaactgaattgggtatcccaattcctattttacactcactggaaacgtactcgagggtrttctataaggcaaatttaccaaatttaacttagcaatgctcatttttatatatctacttccttaaaacaggatctatacacacatagtagtttgaatcctatgaaacccatgtatttggggggtttttgagttttttttttctttttttgagacaggatctcactctktcacctgggctggagtgcagtggtatgatcatggctcactgcagcctcaaactcctgggctcaagggatcctcccacctaagcctcccaaatagctgtgaccacaggcatatgctaagatgcccaggtaattaaaaaaaaatttttttgtggagctggggtctcactttgttgtccaggctggtcaagaactcctggtctcaagcgaccctcccgccatagcctccctaagtgctggaattacaggcatgattacaggcaggagccaccacacactgctggtctttagtgaggttttttttacccacaggaacatcagtttattagggtttaccctgataaaatcatttgagcttcaaacaaatagtgaagtattataccaatcttcaatgatttaaaaaaaaaaaaaaacaggctggacgcagtggctcacgcctgtaatcccagcactttgggaggctgaggtgggcagatcacctgaggtcaggagttcaagatcagcctggccaacatggtgaaacctcatctctactaaaaatacaaaaattagccaggtgtggtgacaggcacctataaccccagctacccaggaggctgaggcaggagaatcacttgaacccaggatgcagaggttgcagtgagctgaaatcgcaccactgcactccagcctggatgacactgtgagactctctaaaaataaaaataaaaaaaaaaaaaacacctctgattggcactgtgagcttgattgtgttaaattgaaaatacataggccaggtgctgtggctgatgcctgtaatcccagcactttgggaggcgtaggcgggcagatcatgaggtcaggagatggagaccatcctggctaacacggtgaaaccccgtctctactaaaaatacaaaaaattatcagagtgggtggcacacgcctgtagtcccagctactcgggaggctgagacaagagaatcactggaacccagtaggcggaggttgcagtgagccgagattgcgccactgcactccagcctagctaacacagcgagattctgtctcaaaaaaataaaaaaaattagaagtcagcaacaaataagccaaaatatctcatgctctacacattgttctcctggaactccagggcacaatttggccagggaaacaaaaggcattcgtaattctacaattctacaaaactaacctatgatatgatactttaatttcgcttgtctcttaagagcccaaagtgcttttgagacaccataacacctttaacacataacgtacaaatacatcacttccattttatttatggtagagaataggatacaaaaagattggatamcgtgcctgacatcaggcaaaaattgagaactgggcttaatttttcaagtggtctatcctgtacttaccacaacaaccttatctttttaaaaagtaaaacgtcagtacctrgcagtgtgrtattgghaaaartaggctgtccgtcaacattgagagatggcacavatwattcagttkrgbtaascagaarcccatcgtgtgtccctgcayctcysragvghyaaaskyvacctatcgggacaagcaaaggttgttaaagagccacaccggtggctgggcacggtggcccacacctgtaatcccagcactttgggaggccgaggcaggcggatcatgaggtcaggagatcaagaccgtcctggctaacgtggtgaaacctcgtctctactaaaaatacaaaaaaattagccaggtgtggtggcgagcgcctgtagtcccagctactcgggaggctgaggcaggagaatggtgtgaacccaggaggtggagcttgccgtgagccgagatcgcgccactgcactccagcctgggtgacagagcaagactccgtctccaaaaaaaaaaaaaaaaagagccagactggtctgagtcagggcacctattttctccatttcccctgacctacacaaaaagcttacctctcactctgcttaaatattatacaaagcccttctagtaacattatctcagtcagtcctcacaacagatccatttacagatgagaaaacaagtctgagagaagtgacatgctcaaggtataagacagtaagcaaagagcgcgtacttaaagctctmaatcccatgccctttctgctaccatggtggaaaagggaagcctaggtcaagtacgtgattacaaatcacagcaaaccctgcaaactaaagagaaaaagccactgacttctcaaatcagtgcttctcaaaaacaaggaagtgcaaaaacatgtcgagagaaaactcatcaaaccctaagatctgtgcattttactgtatgtaaattataccagaattttcttttctttttcttttttttttttttgagatgcagtcttgctctgtcgcccaggctggagtgcagtggcacgatctcggctcactgcaagctccgcctcccaggtttatgccattctcctgccacagcctcccaaatagctgggaccacaggtgcccgccaccacgcccggctaattttttgttattttcagtagagacagggtttcaccgtattagccaggatggtctcaatctcctgatcttrtgatccgcccgcctcggcctcccaaagtgctgggattacaggagtgagccactgcgccyggcccagaattttcaaaatgcatacatcacaaacaaaagagggcaggaagcaatcctccagccctaagattctgtttaaggaaggaggaggttgtctyagaataaatatagcacttgttcctcggggcataaatttacttacagatttgatgggaaattttaagaaatgtaaacttgtaattttttaaattttggtaaaatatacataaaagttaccattttatttattatttagagatggagtcttgctctgttgcccaggctggagtgtagtggtgtgatcttggctcactgccacctccgcctcccaggttcaagcaattctcctgcctcagcctcccgagtagctgggactaaacaggcgcatgccaccacatgcagctaacttttgtatttttagcagagacagggttccaccatattggtcaggctggtcttgaactcctgacctcaggtggatctacctgcctcaaacatttaccattttaaccatttttaaatgtacaattcagtgcattaagtaccttcaaaagtaatgttattttctttttttaagacgaggtctctatgggtgcagcacaccaacatggcacatgtwtacatatgtaacaaacctgcacgttgtgcacatgtaccctagaacttaaagtataataaaaaatttwaaaaaaataaaaaagagatgaggtctcagcctgggcaacatagcaagacctcatctctactaaaaataaaaataaaaaaagaaattagccagacatagtggagcatgcctatagtcccagctactttgggaagctgaagctctgggaggactgcttgagcccaggttaagggtgcaatgagccgtgatcatgccaccaaactccagcctccacactccagcccaggcaacwgcaggacatcctgtctcaaaaaaaaaaaaaaaaaagacaagatagagagacagggtcttgctgtgttaccagactagagtacagcaactattcagaggcaccatcatagttcactgtagcctccaactcctgggttcgggtgatcttcctgcctcagcttcccaagtagctgggactaaaggcaggaatgtgccctgctaatttttcaagaattttttttttttttaaatacagacagggtctcactatgttgcacaggctggtctccagctcctgggctcaagaaatcctcctgcctcagcctcccaaagtgctgagatcacaggcatgagccactgcacccaggctcagtaaatttttatattaaatcgggcacagaaaaattttggagtaaaatacaaaattcatacaatttcctatataaaataggagcctacagaaatgttgatccctggaaatactgtgttcttcatctaacattagaagtctggtgtaaaagtgtattaagtacaccaccctcaaggaagaaagatcgggatccttgcaaaaatcctttgtaaagattaagtgacactaggactacttctctgcttaaaggccatggcaagattactgcctgcaccttaggtaaggcctagttattcctcacctgggttttcacaactacctaactgcttcctcgacagcagtctttcccctccaaaccacttggcaacctgggtgagcttttcagtatataaatctgacaatgtcatgtccctgcttaaaaactttcggtcggacgttgtggccgaaatcccagcacgcctgtaatcccagcactttgggaggccgaagcaggcagatcacgagcgcaggagayggagaccatcctggccaacatggtgaaaccctgtctctactaagaatacaaaaaattagccaggcttggtggtgggtgcttgtagtcccagytacgcggggggctgaggcaggagaatcgcttgaaccaggagtccgagattgcagtgagccaagattgtgcaacagcactccagtctggcgacagatccagactccaactcaaaaatatatatacataaatactgaaaaactttcaaagggctgggcgcagtggcttacacctgtaatctcagcactttgggaggccaaggcgggtggatcatctgaggtcaggagttcgagaccagcctrgccaaaatgacgaaacccccgtctctactaaaaaaaaaattagccaggagtggtggcgcacgccwgtaatccccgctcctcgggaggctgaggcaagagaaccacttgaccccaggtggcagatgttgcaatgagccgcaatcgcgccactgcatyctagcgtgggccactgcactccagcttgcagagcaagactcccgtctcaaaaaaaaaaaaaaatttcagtgcccccatattcctaggggtaaaatcaccttttaagcatcctctcccaagactccaggtctcaacgcacgcatgtctagaacctcttacctagggttggctagttcctactccatcctgctctcttccttctccgggaagtgctccttaactgaaaccacacaaccgcaacccctccatctcccagcaggcaggtaagtcaatttcccacgccacacacggtcggctcttccggcgccaacatgaccctggcttgttcctgtctttgcatctgtcagtctccccaggaggaatgtgttctccacgagggcagggactacgcagaactggcccactggagtcatgaggactgaacagatggggtgttaaggatgcagcttttctttgaggggaaaatacacgtggggtgggggactggggggagccaccttcaaatgcaaactattcggccttataaagaatgctctgggccgggcgcggaggctcatgcccataagcccagcactttgggaggccgaggcgggcggatcacgaggtcagyagttcgagaccagcctgaccaacatggtgaaaccccgtctctactaaaaatataaaaatcagccgggcgcggtggcgcacgcctgtaatcccagctactcaggaggctgaggcaggagaatcgcttgaacccgggaggcggaggctgcagtgagtcgagatcgcgccactgcactccagcctgggcgacagagcgagactccgtctcagaaaaaaaaaaaaaawwaaaagaatgctctgacgcttacgagcagcgtcaccctggatgtgtcctgcctcaaggggcctcagttccccgtctgcaaaatggaccccggggcggtagaggggcttcagaccgtgctatcgtccctgctgggtcgggcctaagcgccgggcccgtacvtcrktdshtgtggatgcggssgcccgtgccaggcggcagcgttgggyrsggckrcggctmgyngtcgaagwwgrgbswtacgvvcrgcamgacgcscgrmhygsgankgcasrwgatgmcctrggagggctmgcgcbagttcaccnmgsgcrgcacgggccgcggccgcccggcctccatctcctcctcggcgcccagttcctmcgggccggactcttccgggccsgrctcctcggcgcccgactcctcsccgccgtcttcttcarggccgtactcttcgacgcctgcctcctccgcgcctacctcggcctcgtcccagttctccgccctccggggcattccctccgcgatccagaccacccgggccggacgccgcgggatccgcgggtcggacgcggggcggagctgcgtgcgcrctcccgagtcgacctccgtagtcttcgcgcgcgctcggtagaggatggaacgcgctcgcggaaatagccggccggaggctgtgcgcgtgcgcagaaggatcctccagcaccgtaggcygttgtaacggaggcgaggctaggccaactcgttactgtatttccactataaaattttttttcrcccctctaaggtttggtgttttttttttttttgagacagggtctcactctgtcgcccgggctggagtgcagtggcgcgagcttggctcactgcagccttgacctccctggctcaagcgatcgtctcgcctcagcctcccgagtagttggtactgtaggcgcgcaccaccatgcccgactaattatttttatttgttgtttgaaacggagtctcgctatgttgcctaggctggtctcgaactcctgggttcaagtgatcctcctgccttggcctctcaaagtgcagggattacaggccttagccactgtgcctggtggactaactgaattttttttttcttcatgtcagacgcgcaatgtgccgacgtcgtaacaaggttcgagggtggcgcatctcacacgggaacacccaatcatcacgcttataaagtacaaaaagtcaactaactgaattcttacaaggcatgggtgattagtaaagagggaaaaataattagacctactatgtgcagagcactctggtggaaattggaaaatcagatatttacttcagagcaattaaaactacaaacataaacactcattaactttgttcattttacaaatatttattaaggccctactatgtaccacctatggtgataagtgttgaaaatattgtaaaaaccggtcatgtttcctgccttcactgcacttcaataaaagcgtcatayggtaatcaatcacacaaataaaatagcaactatggccgggtgcagtggctcatgcctgtaatcccagtactttgggaggctgaagtgggctgatcacaaggtcaggagttctagaccagcctgacaacatggtgaaacctcgtctctactaaaaatacaaaaattagcctggcgtggtggtgcgcgcatgtaatcccagctacttaggaggctgaggcaggagaattgcttgaacccgggaggcggaggttgcagtgagctgagattgtgctactgcactgcagcctgggtgacagaatgagactctgtctcaaaaaaaaaaaaaaaaaagtgcaactgtgactagtacgacaaaaagagacagggtactatagaaggctaaagatctgggggtcaaggaagatggtacacaattctgtgtaattaaatgttcaatgatgtgggatggactcaagtggagaagcagctcagaaaaagaagggttcagagagttttatattagttaaaaataatttttttttagacagtctcgctttatcacccaggctggagtgcagtggctcagtctcagctcactgcaacctccatctgccgagttcaagtgattatcgtgcctcagcctctggagtagctgggattacaggtgtgtgccaccacacccaggtaatttttgtacttttagtagagacggggtttcaccatgtttgccaggctggtcttgaactcctcacctcaggtaatctgcctgccttggttttcccaagtgctgggattacaggtgtgagccaccgtgcccagctcaaaaataaatttcaagtagaaagaaaaaaatctatcaagtgccagacactgtgctaagcatcccacgtgaattaaggctatgtcattatctccatttcacagctaaggaaacagaagggtatataagaatgtgaaggcctagcactatacgcctgtaatcccgagattttgggagcccaaggcaggtggatcacttgagttcaggagttggaaccagcctgggcaacatagcgaggtcctgtctctataaaaaatgaaagaattagccaggcatagtggcgtgcacctgtagtcccagctactcaggaggctgaagcaggaggatcacttgagcctgggaggttgaggctgcagtaagccgtgatcatgccactgcactccagcctgggcaacagagccagactctgtctcagaaaaaaaaaaaaatgtgaaaagggtagtcaaaatgctggatcagagaggctcatcacctgatgccttaggagaaaatgacagtatgagtgaacctcaggagttggayatctccacaaaagcactgacaccatgaacctaagtaattttgcctagggctctccttgacagctcactgcacagagatggtgtatcctggtggcctccagcaggattaagkgaccagcagtgatgctggacccccagctacattaacaacatgaaaacactgtagagaaaaatcccaaagtaggccagacgcagtggctcatgcctgtaatcccagcactttgggaggccaaggtgagcagatcacttgaggtcaggagtttgtgaccagcctggccgacatggtgaaatcccatctctactaaaaatacaaaaaattagccagcatggtggcctgcgcctgtaatcccagctactcgggatgctgaggcaggagaatcacttaaaccccagaggcagaggttgcagtgagcccagatagcaccactgcactccagcctgggcaacagagtgagactccactcaaaaaataaataaataataaaaataagataaaccccaaagtaggacttctgttaatcaaattacaatggcttagagccatcataattcacaagattcatgcaaacatcccctcagttktactcccatgctagcgaggtgaaatataacagtttaatattacagaaatgcctacatccctaaaatgaaaccagttgtttagataaatgcaggctttgagaytgcaaataatgtttcaaagatcatttaagaggaaggggtggccaagcacggtggcttgtgcctgtaatcccggcactttgggaggccgaggtgggcggataacttgagctgaggagctcgacactaggctgggcgacatgatgaaatcctgtctctacaaaaaatacaaaaaattagccgggcgtgggtgcacctgtagtcccagctgctcaggaggctgaggctggaggatcacctgagctcaggaaggtcaaggctgcagtgaactgtgatcgcgacactgcactttagcctgggtaacagagcgagactctgtctcaaaaaagaaaaaagaaaagaaaaagttgcaaaggaaacaagtttagaatacacaggcaaaatttttcttacagtacacttttcattaggcaaaaagacatgtagaaaagaataaaaaatacaatgtctaaagacaaccggtgggccgggcgcagtggctcacgcctgtaatcccagcactttgtgaggccaaagcaagtggatcacgaggtcaagagatcaagaccatcctggctaacccagtgaaaccctgtctccactaaaaatacaaaaacaaaattagccgggcatggtggtgggcgcctgtagtcccagctactcgggaggctgaggcgggagaatggcatgaacccgagaggcagagcttgcagtaagcggagatggcgccaccggactccagcctgggcgacagagcgagactccgtttcaataaataaataaagacaactggtgacttgttctatctccttttctgtcttttccaaattttctctaagggggatatattttgccttgtttgtatgtcgaccaattaaaatatacaagtccaataataaagcaaatactgataatgtcacatgtaattagcatgytgccatatttacttcgtttccagtttttgcaatgagctgagatcgtgccactgcactccagcctgggcgacaaagcgagactctgtctcaagaaaaaaaaaaaaaccagagtatcttgtcacccccaaaactccttcatggtcaaaccctgcttccactgttaatccctggcaagcactggtctgtctgtcttgtgtccctatagttttgcctttccagaatgtcacacaacaaaatcgtatcatatgtagccttatgagtttggctttttttcacttagcataatgcatttgagattcatccaagttgtagtatataataacttactcatttttattgccaagggtattccatactatctacttaccaactgcaagatattggtttgtttccagtttttagcaattataaagttgctatatacattagtgtacaggtttcttgcaaacataagttttgtttctcttgggtgagaatcacctaggagattgctaggtcaaacacaaagtacatgtttaacttcatgagaaattgctaacctgtttccccagagcagttgtatcattttgcattctcaccagcaatgtatgactgttccagttgctccacattcttgtctacagttggtattatcagatttgaggttttgttcttttttttttttttgagacagtctcgctctgccgcccaggctggagtacagtggcacaatctcggctcactgcaacctccacctccggggttcatgtcattctcctgcctcagcctcccaagtagctggggctacaggcgcccgccaccacgcccagctaacttttcgtatctttagtagagacggggtttcaccgtgttagccaggatggtctcgatctcctgaccttgtgatccgcccacctcggcctcccaaagtgctgggattacaagcgtgagccaccgcgcctggcctggggttttgttctttaaaaataaaaaaattttagccattctaattgatgtatagtggtatcttattgacgtttaatttgtacttctgagaggtgacaatgtgctggcagccctcgcggccctcgctcactctcggcacctccttggccttggccaccactctggccacgcttgaggagctgtccagcatgcggctgcactgtgggagcccctttctgggctggccaaggccagagccggctccctcagcttgcagggaggtgtggagggagaggtgcgggcgggaaccggggctgccgtggcgcttgtgggctagcacaagttccgggtgggcgtgggctcagccggcctgcaagcccagggcagtgaggggcttatcacctgggccagcagctgctgtgctcaatttctcgcagggccttagctgcctcccagccgggcagggcccaggagctgcagcccgccatgcctgagcctcccccctcttccgtgggctcctgtgccacccgagcctccccgacgagcgccaccccctgctccactgcgcccagtcccatcaaccacctgagggctgaggagtgcaggtgcagggtgcgggactggcaggcagctccacctgcgccccggtgcaggatccactgggtgaagccagctgggctcctaagtctggtggggacttggagaacctttatgtctaggtaagggattgtaaatacaccaattggcactctgtatctagctcaaggtttgtaaacacaccaatcagcaccctgtgtctagctcagggtttgtgaatgcaccaatcgacactctgtatctagctactctggtggggacttggagaacctttgtgtttagctcagggattgtaaacacaccaatcagcaccctgtcaaaacggaccaatcagctctctgtaaaatggaccaatgggctctctgtaaaatggaccaatcagcaggatgtgggtggggccaggtaagagaataaaagcaggctgccagagctagcagtggcaacccggttgggtccatttgtatgtcgtgaraggtttgttcttttagtcgttgcggtaaatattgttattgcttactctttgggtccgcattgcctttgtgagctgtaacgctcaccgtgaaggtctgctgaagccagcaagaccacgaacccacttggaggaaccaaaaactctagatgcagtgctttaaaagctgtaatactcgcggtggtctgcagcttcactcctgagccagcragaccacgcagccaccagaaggaacaaactctgaacacatccgaacatcagaaggaacaaactctggacacgccacctttgagaactgtaacactcaccgcaagggtctgcagcttcattcttgaagtcagtgagaccaagaacccaccaattctggacacacttctctagtgactaacaatgttgagcatcttttcatgagcttgtttgccattaaaaaataatcaagctggccaagtgcagtggctcacgtctgttaatcccagcactttgggagacccaggtgggaggattgcttgagcccagagttcaggaccagcctgggcaacacagtgagaccytatctctattttgtaaaataattaaaaatttaaaaaataaagctaatgtatttattacttcagtttttttgtggtgagaacatttaagatctactcttttggctgggcacggtggctcatgcctgtaagcccagcactttgggaggccaaggtaggcagatcatctgaggtctggagttcgagaccagcttggccaacatggtgaaaccctgtctctactaaaaatacaaaaattagccaggcatggtggtgggtgcttgtagtcccagctacgcggggggctgaggcaggagaatcgcttgaacccagtgtcagaattaaaggagagaaacatgaagggtgggttgacagtcaacaggtttatttcaaacctgggagggatttctgaccaagttaggtcagaagctgcacaatcttacagagtttttaaggattcagggtgggagagtttatcagaggcttcgactgcttctgtgtctcttcgttgtgcttacctgggcgggagagttgtctgttcccgtacatctttctgcagctgcaggcatgtcccctgagtctgcttttagcttccctatcttagtgcacctgagggaaagaaatgtgcctattaaggcccactgttttactggggcacattgtatgagggtgaagtttggcagttacccagttacccaagtagggggaaagtagactttccccctacttccctctgtgcccaagctgtcttatctgtgttttactgtctgctctttctggctgcttgtggttagaagagaagtgatttccttgaaatgtatgaggctagaaagggagctggaacttaaagtggtggtgtttgtccaagatgacagtgctcctgctctgtcacccaggaggcagaggttgcagtgagtcgagatcgcaccactgcactccagcctgggtgacagagcaagaccccgtcttagaaaaaaaaaaaaaactacactcttaacaattttcaaatatacattatttattaactatagtcatcatgctgtataacagatgtccagaatatattcctcccaaccaaaagggtgactcgtaccctttgaccaatatctccctgtttcatctcaactcccctggccctggcaaccaccattgtactgcctgcttttgtgagttcaacgtattttattgatcgattaattgattgagacggagtttcgctcttgttgcccaggctggagtgcaatggtgcgatctcggctcaccacaacctccgcctcccgggtttaggcgattctcctgcctcagcctccmgagtaactgggattacaggcgcccaccactgcgcccggctaattttgtatttttagtagagayrgggttttgccatgttggccaggctggtctcaaattcctgatctcaagtgatctgcccgtcttggcctcccaatgtgctgggattacaggcatgagccaccgcacccagcgcacattttctttatccattcgtctggcaatggacacttgattccatagtgtggctattgtgaatagtgctgcaatgaacatgggagtgcagatatctcttcaaaatactgattttcatttcctatgtatatatacccagaagtgagattgttggatcacatggtaattccatttttagtttttccaggaacctccaaactgtttgccataatggctgtactaatatacattcccaccaagaacctgggagggttctgttttctccacgtcctcaccaacacttatcttttggccatttaatgtcttctgttgagaaatgtctacttaggtcctttgcccattttaaaatcgtttccttgctattgaggtccttatatattttgaatattaactccttattggatgtatgatttgcaaatgttttctcccattctgtaaactgccttttcactgtttttttacttcttctcacatcagatgggcaatgtgttgacatcataacaaggtttgagggaggcacacctcacacatgaacatgaaaacccactcatcatgcttatgaactatgaaaaactctgttgtattttgtttgccattcttgtttttttttttttttttttttttttttttgagacagactctcactctgtcgcccaggctggagagtagtggcgcaacctccgcctcccaggttcaagtgattttcctgcctcagcctcctgagtagctgggactatagatgtgcaccaccacaactggcctagttttatatttttagtagagacggagtttagccatgttggccaggctgatgtcgaacttctgaactcaggtgatccacccgccttggcttcccaaagtgcttggattacaggtgtgagccaccgggctcagcctgttttttgtcttcaaggtgtcagttcaaatatttcgtccatttatttagctgttttcttactgctgagttttaatagttctttatatatttattcaggccaattgttaatgcttttcaaatgcatgtgtatgtccataatgtatatgtggtgatatattacttttacaatggtaaacaaacaaaaataacaacagcaacaaaaacccaaacatcatttccatgtacaatacaattttggcctatggtatctttatcatgcagtgaagttgataccacattgctcctttgtgtatgttgtgttttcctgaggtttttctgcaaatgtcattctagtgtcttttgctttgagaacatacagtgaataaatgactatactataagctccttaagagtagaaactgtctgtttctcattttatctccagtgcctcacacataatagacatacaatgtatttaatgctaataaacaacttcttaggcaaaatgtttgtgaaagccacactgaagcatttatcatttattgaattgaaacatttcatttcatttattcatttattgagacagggtcttgctctgtcacccaggctgaagttcagtggtgtgatcttggctcactacagccatgacctcctgggcctaggtgatcctcccacctcagccccatgagtaactgggactacaggcatgcaccaccacacccgcctaattgtgtttattttttgtggtggcggtctctctgggttgcccagtttgtcctcaaaactcctgggctcaagcaatcttcccatctcagcctcccagagtaatgggattacacgcataagccaccacacctatccaataaaattatttttttaaaaactgttatggttggaaaatgcagctgaggcacaatacaaacttcacgcttgatagtcgtagcaagctcaaaggagccaaagataactttgtcctaaatgcaaatgttgatgccaatggataccaccacttagataaatgtaaygaacaattgcttttttgcactctcaaggtatcagtgagatccagggagaggctaatagagggccggtatggtacagaaaacacaaaacttatttatgagactctgagtggctctgcactgacctgggaataaggttttagttttggctttgccaccaggatggacatgtctgtcactcaacctgtctgggtttgcttctatattcctagaatggcaggggcagactagattatctctaagattctttctcaccctaatgttctgtgagttttaattcttgctagtcctaatcttttgccaatttagtgcacagggtgactttacttttttttttttttttttttttttttttttagcagatacggtgtctcactatggtgcccaggctggtcttaaactcctggcctccagtgatcctccagggtaacttttcattagaaaataaaccagccgggcacagtggctcatgcctgtaagcccaacactttgggaggccaaggcgggaagattgcttgagcccaggagtttgagaccagcctaagcagcatagtgagaccctgtctctaaaaacaaaaaaaacaaataaataaagaaaaattaaataaagaaaccccagcctggccaacctggtgaaaccctgtctctactaaaaatacaaaaattagctgggcctggtggtgcatacctgtaatctcagctcttcaggaggctgaggcatgagaatcgcttgaacctgggagacagaggttgcagtgaaccaagattgcgccactgcactccagcctgggtaacaaagaaagaccctgtctcaaaaaaaaaaacacaaaaaacaaacaacaacaacaacaaaacctgagaactctaaatcagcctttcttattgtataatctagttgacagtcatatggcctttagatgttagttgttgttgttgctgttattattgttttgagacagaatccagctctcttgcccaggctggagtgcagtggcatgacctcaacttgctgcaaattccacctccaaggttcgagcgattcttatgcctcagcctcccgagtagctgggattacaggcacacatcatcaagcctggctaatttttttttttttttcatttttagtagagatggggtttcaccatattgaccaggctggtctcgaactcctgacctcaagcgatctgcccaccttggcctcccaaaatgctgggattacaggtgtgagccactgcacccagccatgaagttttgaacaattatttacggcagcaattgtctgcaaactgccagagcaaattttctaaatcatattatccagaggcaactgggggccaaccttttttgcaggcaacagcatgaatctgagtataaatactgggaaagagcctagagatgaacaacaggcttcctgtccccaccaccatgtttatttgtttattttttctatttttctttttattgtagagacagggttttgctgttggccaggctggtgttgaacttctggcctcaagtgatccatccgccacrgcctcccaaagtgctgggaggcataagcctcagcacccagcccccacaccatgtttttgagatggtgtctcactctgtcaccaaggctggaatgcagtggcatgatcatagctcactgcagcctcgaccttctgggctcaagcgatcctcctacttcagccttcccagtagctgggactataggcttgtgccaccacaccctcctaatttaaaaactgcttttatagaggggggtcgcactatgttgcccaggctggtctcaaattcctgggctcaagcaatcctcctgcctcagcctcccaaagtgctaggactataggtgtgagtcaccacgcctggcctgtactctacttagtgtggcttatagtacgggctgagtattatctgaaatgcttgggaccagaggtgttttggatttgggattttttcagcatttggaaatctgaaatacttttggaacaaccttatatacgtactcattgagcatccctaatccgaaatacaaaatgctccaatgagcatttcctttgagtgccatgtcagtgctcaaaaagttttagattttgaagcatttcagattttcggagtggggatcatcaacctgtagtatacttctttagcttggtgaaataaacatgggtagttaaaggtctgagtagcaagagtggaatgacagaactgggtacttctgtaacgatcagccagacaataagctccctattttttcctgcttctgaaatccactttaaccatgttggccaggatggtctcgatctcttgacctcgtgatccgcccgccttggcctcccaaagtgctgggattacaggcgtgagccacagcgcccggcccaagcttaatttttaaagacagactgaaaactgctttattatcaagggacttgcaatctatgcctaatagctcatgggttcaaacctcttacttttcagcttttcagtaaataagtgaattaaaccaaattatagggtaaaaaacatttcaaagtatacaggcatgaagaggttcccttgaaggtgcctatgaatggcttagaggaaaatttaaaatttagctcattttccactcaagattttttttttttaagacaaggtcgcactctgttgcccgggatggagtgcagtggtgcaatcccagctcactgcagcttccacctcctaggcgaattgcttgagcaatcctacttcagcatcctgagtagctgggactacaggtgcatgccaccatgcccagttaatttttgtatttttagtggagataggggtcttgccacattgcccaggttggtctcgaactctgtctcaaaaaaaaaggtagattaaaaaaattataattaaaaaaattatgatgagttggctggacataaaaagaaaaaaagagctgccgggcgcggtggcttacacctgtaatcccagcactttgggaggctgaggcaggcagatcacgaggtcaggagatcaagaccatcctggctaatacagtgaaaccccgtctctactaaaaatacaaaaaattggccgggcgtggcggcgtgtgcctgtagtcccagctacttggaaggctgaggcaggagaatcacttgaacccgggaggcggaggttgcagtgagccgcaattgtgccacagcactccagcctggcagcagagcaaggctctgtctcaaaaaaaaaaaaaaaaaagctaactaaaaaaatagaaaaattaaaaaaaaaaaataaagacgggtctcattatgttgctgaggcttgtgctgacctcctaggctcaagctgtcctcccacctcagcctcctgagtaactgggattacaggygcacaccaccacacctagcagtatggtactattaagggcactaactcgtttagagcatattattttaataacaataaattaagatttttttttttttgagatggagttttgctcttgttgcccagtctggagtgcagtggtgcgatcttggctcactgcaaactctgcctcctgtgttcaagtgattctcctacctcagccccttaagcagctgggattacaggcaggcaccaccatgcctggctaatttttcttgtatttttagtagagatgggttttcaccatgttggtcaggctggtatcaaactcctgacctcaagtgatccacctgcctcagcctcccaaaatgctgggattacaggcatgagccactgtgcccagccaattaatatctagaagccaataaaaaacgtactgagcattttcacatgtaatgtcataaaaagaagagctttttctgcctagtataccatcacttttgccactattactatatcatgctggtccttgcatatagcaggaactcaatgctttttttttaagcacctgtctgctattaaatccatgtgtcttttaaactgacggcaccagataacctaaaacttgaactttagaactacttctttttttttgagacagtctcgctttgtcgcccagcaggctggagtgcggtggcgtgatctcggctcactgcaatctctgcaggttcaagcaattctcttacctcagcctcctgagtggctgggattacaggtgcctgcgaccatacccagctaatttttgtatttttagtagagaccgggtttcgccatgttggccaggctggtcttgaactcctgacctcaagtgatccacccagccaaagtgatgggattacaggcatgagccactgcacctggccaaagatgttcgtttctattctaggatgcacatgctaaatcagagataaatccatatcaagatcaaatccagagctgaagcacagtgtcagcatggtaggattgggaggaactgagaagaggaaaagggcaatactaaatgaaaaagtcaagtccaggagaactttcagggggaaatttggcttgaggtagacttttttttttttttgagatggagtctcactctgtcgcccaggctggagtgcagtggcgcgatctcagctcactgcaagctccgcctcccgggttcaggccattctcctgcctcagcctcccgagtagctgggactacaggtgcccaccaccactcccagctaattttttttgtatctttttttagtagagctggggtttcaccgtgttagccaggatggtctcgatctcctgaccttgtgatccacccgcctcagcctcccaaagtgctgggattacaggcctgagccactgaacccggctatctgcttttcaaagagtagacacttagcttgtgccttataaaactaataatcttccttggattgtggctaaattgtgtgaatrctggtatttcaamagactgtaagcatcatgtctgattcaakgctgtatgttttattggagtttaacatgcctacatagtaaatacttggtaaatgtgctgaatgaccaaatgattcccaagatgagctagtcagctgaaagtccaaacatggggacttgggctggtaagccacctaggctttgaatcaaacagctacatctgaaagttttatgttagaataataacgccatgtattacatttctgtgcaataagtgaacccatctctagctcctctccccaccataatcacagcagtcagataaaaagttgaggagtttattagggaaatatgagaggcatagacactccaagtgacagaaagaaaagtctgaaaatgtcccttcaagccaagtgggggcctggccttgacctctccaaatcaacaagaaactggtgggttagcaacaacattctctggcagccacattgccagggcatgagtgtcttgaccaggactgccccgcacttcccaccaaaggtggggaggagacaaagactgttcacagaagcagtgcaaaggcaatgagaactttaaggaaagtttgagagagagagaaagaaagatagaggtgrggaggaccttcacaaagagtcccaggcttttggctgtgaatgtctcaaatacattgacaagtagatgtataaaatgttactgaaaaggtaaaatgcctaacgtcgtttccaacggttcctctgaacttcttcccacataccacaccacaccccagatggcagagcccaaaggccacacttttgaaaaaagaaaaacaagaataagccctgttgctctttaaggagaaaggaaggagctgaaggctgctggggcctttcccatgtggcctgtgttgtgtaaagcaacttcccagcagcagcacggcactgttctaggtgagtgtctcaccttttgtcacctgtgaaaggaaaggaaaactgacatttagataaattaaaaaagattagaggggtctaaaaaaaaatctttagatcctaggcagtgagaaatagcagaaaagaagatagctgtgaagtcacagaaacatggttcaaatccaggcaacatgcttaacttttctcttcttttgtttttttgagatggagtctcactctgccacccaggctggagtgcagtggtgtgatctcggctcactgcaacctccacctcccaggttcaagtaattctcctgcctcagcctcccgagtagctgggacaacaggtgtgagccaccatgcctggctaatttttgtatttttagtagagatggggtttcaccatgttggccaggctggactcgaactcctgacctcaagtgatccacctgtcttggcctcccaaagtgctgggattacaggcgtgagccaccatgtccggccagtgcttaagtttcctaagactgtttctgctttcaggtttttttcagcaataagtggaaatgtgcattctctctggaatgcccttgcccatcaaactcacccgagcttcaatgtactctattctccgttcaagggctgtcaatttctcgtttagtgttgcaagtcttgaacgacaagacatatctgagaaaaagagactggtgttcaggattaatgtcactccaaacacagacacagacacacacaacacctacaatgaaaaagaggaataatacacagaatacaaatggaaatggatacagtgctaagatccactcatagcacagttgcttagagtggatctgctgaacttcctatcaagtgttgcaagtagagaataacggccccacaaaaacgtcctttcctgcagggcacggtggctcatgcctgtaatcctagcactttgggaggactaggcgggtggatcacctgaggtcaagagttcgggaccagcctggccaacatcatgaaaccctgtctcttactaaaaatacaaaaattagccaggcatgatggcacatgcctgtaatcccagctacttaagaggctgaggcaggaaaatcacttgaaccggggggggcaaaggttgcagtgagccaagatctcgccacttcactccagcctgggtcaaacagcaaaactctgtctcaaaaaaaagtcctttctctaatccctggatcctgtgaatatggattatacatgaggaaacagggctttgcaggtatgattaaggttaagaaccttgagatcctagagtttgtcttggattgtccatttgggcccaatctaatcatagtccacaaatgtaggtgagaaaggcataggaagggggtcagagatgaaatggaagaagaaaaagagattccaagtgtgaaggggatgcaatctgccattgttggctttgaaagtggaagaagggagccatgaaccaagggatgtaagtgacctttagaagctgggaacaactctcagctcacagccagcaacaaaacagagatctcagtcctacaaccacgagaaactgaattctgccaacaacccaatattcgaggaactagaccctctcctagagcctccagaaaggaaggcagtcctgctgaaaccctgattggagcccaggccaggagcagkgactcatgcctgtaatcctaatacttcagaaggccaaggtgtgaagactgctggccaaggtgtgaagattgctagcccagtgaccagtgtttgatttatgacctacacatggtaaataataaatgtatgtggtttaagccacaaaatgtgtggtaatttgtttttttggtttttttttttgagatggagtctcactctgtttccaggctggagtgcagtgacgcaatcttggctcactgccacctctgcctcccgggttcaagcgattctcctgcctcagcctcctaggtagctgggactacaggtgtgcgccaccatgcccagctaattttttttttttgtatttttagtagagacggggtttcaccatgttggccaggattgtctcaatctcttgtcctcgtgatccgcccgccttggcctcccaaagtgctgagattacaagtgtgagccactgtgcccagcctgtgtggtaatatgttatgccaggaatagcaaatgaatacaccaaggctgtacagccatttactaatggcctaactaagactttcaagagaggggacatggcaagaataagaaaataatctcaacaggaaagaaacgaggctgggcgtgatggctcacgcctgtaatcccagcactttgggaagccaaggtgggcagatcaactgaggtcagaagtttgagaccagcctggctaacatggtgaaaccccatctctactaaaaatacaaaattagctgggtgtggtggcgggtgcctctagtcccagctactcgggaggctgaggcaggagaatcacttgaacctgggaggcggaggttgcagtgagctgggattgcaccactgcactgcagcctgggtgacagagtgagactccatctcaaaaaaaaaaaaaaaaaaaaaggccaggcacggtggctcaggcctgtaatcccagcactttgtgaggccaaggcagtggatcacgaggtcaggagttcaggaccagcctggccaagacggtgaaaccccgtctctactaaaaatacaaaaattagccgggtgtggtggcgggcgcctgtaattccagctattcgggaggctgaggcagagaactgcttgaacccaggagatggaggtagcagtgagccgagattgcaccactgcactccagcctgggaaacagagtgagactccgtctcaaaaaaaaaaaaaaaggaaagaaagtagaggccaagaaagcagcagaaattatggggagggaaggtgtgagagttctgagctcattaaagccatgtcactactgttgctcctagaggcaaaggcctttcagaactagagaaaagttggagagcatcaaatacccgataaagcccacattccatctgtgaaaacagccaaaattattcttcttcctctagcttttccaatcttcttttaccatctcattcaaaatgaaaccagatttaatttaaaacaactttttctctgcaaacttctgtaacaggaactattctttttccaactattctcaacatatgagagaaaaggtatcttagcatggtcattatcttctactctctcctccaacattgttgttcagtcatctctcaataaacttcagttttcaagtctgaaatattcgctgagactctcccacgcaatgatttaacacttagctaacaagtttccttttcatctattccctggctgttttgcaaaagcgcttcagcatccattttgacaaatcttcctacaccctgatcttgcctcaactttcatcttattatgtccaaatcttactcatcttgcctgcctatctccttcaaggctaagttcaaattctatctctgagaggtcttgccagatggacataataattcttcctcttctgtatttatctaaacatttacggatgaatttttttttttaaaagagacatggtcttgctctgtcacccaggctagagttcagtgttgcaatcatagcttactgcaccctccaactcctaggttcaagtgatccttccacctcagcctcccgagtagctgcaattactactcagtaggtggatgccactgtgcctggctaatttttttgttttttgttttggtagatatgggggtctcactttgttgcccaggctgatctcaaactcctgaactcaagcaatccacctgccttggcctctcaaagtcctaggattacaggcgtgaggcaccgtgccagcctctgaatttctaatttgtaagttattcatgtacttggtctttggttatgacttccctctttggataaagattttacaaataagaatgtgcatcactactatttaagatg

SEQ ID NO: 94437 - DNA, 67981 bp, Homo sapiens
  misc_feature (1)...(67981): n = A,T,C or G
agtggatgcgtgatcataacacaaaggggttgaggggtgggacacagctcaattcgaccataaaagatgaataggagtcatccaggaaggcaggaactggtataatttacaacaggatcagcttactttacaagtaatctcattccattataccaaaccctacaaggtattgtcaatgcacccattttatagatgtgtaagtaaggtttggagaggttaagtaacttgcacaaggtcagagttagaaacttgcaaagaagagacaactctgtaagattttttaaataacagaccctagacccagagcatgaaagtaaatttgttcaaggttagatagatagaaggtgatggaatcaggagtcaaatccaggcatcacattgagagcatggaggtggacagattatagacaatcttttatgttgagaatctggatctcccattgatgatgaagaggctcttaagggttttaattgatgcagcaacctcacatccactctaattcatccagcccaagaagtattagccatagaatctactagtgaagaagtagcaataattttcatccacaatgtaaatatttggggcaaagacattctgttttaaaatgttgagaaaaagactaatagagaaacaagtaacaggcaattctcaaaagagaaaatacaaatggccaataaacatataaaaaagtactcagccaattaaacaattaaatgattaaaatgataataaataccattcttctcccaccagattgataaaatggaaaaagacagataagagcaaatattggcatgaatatgaggaattgtgtacaaacatctgccacttacacgtggtatgacatgatttttcaactttgcagtggtgcaaaagtgatatgcattcagtagtaaccatacttcagattttgaattttgatattttccggtctagtgatatgctgtactatactctcaagatgctggggcagaggccacgagccacaactcccagtcagccatgcaattacaagagaaaacacccaatactccatgatgtgtgaccagatgattttgcccaattgttagctaatggaagctttttgagcatgtttagggtaggctaagctatgatgttctgtacattatgtgtattaaatgcattttccacttaacaatattttcagcttccagtgggtttatcaggacatagtcccatcataagtggaggaggatctatactcctatatgctgtttgtgggaggacaagggagatacatttatactaccactttatagggccatttggagacttaaactttaaaatgtggagactgctagaattgacccagcagtctccattgtttttctatcacttggggaagcacctccacacaaacacaaggaaatccatctcaatactgtaacacctagaaatcagacctgacccaatgcccatccataggggacagctgaaaatactggggcatgttcatagccagaaatactctgcatcggcagctgagaaaatccaactatttctacgtaggctaaaatggatataatgttgagtggaaaacaagagaaatacagaatgatacatatataacgaaatttatgtgaatatgtacttgtttaagtataatgccactcatgttaaattttatatgagctcatatgtatgtatggaaacaaatttagaaagggtttggaaaacgcacaccaaagcagtaagggtggtggcatctgagaggtgaccaccactcagaactttcatggtgctctgatttctatgaaaagaatgcatatatgtatgaattacatgattaattttcattctaataaatgtagagatggatttttaaaaaccactgacacatcagttctcatgcaaaatgctatggccagtgctgtgcagaatgcctaacaagcagaatacagatcttgtctgcaaggggctctgaggtgtaggggaacacctccaacattgtgtgggatacatttcagaagaggagtagaaaatttgattggatgggggcatgttcacaatgtattgggaatcagggaagaatatggcaaccaaggagaggcaaaactgggcaggaaccaaggcaacattgattgaaaggtgtggagggaggagctcctggggcctgtaagggaagatgaagatgggaagggtgggaggcattgtggaaggaaggccaccatgtggggagatgatgctgactccagtcccaggcagcaggggtccctgagaggtctgtgaacagactggaagcttgcctgaaactttgcagagaaaagaagcttggcatccctgcaggggtggattgtcagggtctggaggcaagggacaagtgaagggattaactgtcccactgtgggggaagatgtaggatctgggctgggggcaggcagggagtggtctcaatggaggagggaaatgaatctgagacattaattggattgagacggaaagaaagtggagagaacagaaaccaaagggatttggaggccatgcttccaacgaatgattcatagttagtgtcagggagccagaaaaaaagcaagtgagcaaggtcctgtccctgggagctgtagagaggagccctggggcccacccacaaagcagcacctgcagtctctttccctctcgaagcccagctatgttgtgcacaaagcaagtctgggcaccgaggacaggctggccaagggcaggcaggcaggcacgtagtcctctggcttccagccaccacactcacaggtttctgggaaaggctgactggggccactttgttcctttgaatctgagaatatatgactggggaagcctaaattaattaaatgatgctgaggcccgcctgagccggtgcacaggggatgggttatggagccctgagcaaactgcacccccagcccccagtgctggaatccagagaggctcatgagctcgattggaacgaagcctgtgcttaagtgcttccagagagacaaagaaataataaatcaggagcaggtgccccacccacacactgccatcaccaacaccagcctgcttctccacagaaatacagtggtttcacctctctggaaccagatgtttcagggaagcaacaaatggcaaagccctggaaatgacatggccccacaaccttctcagaaatgaggccaggctgggctggcacctccatccacagcagcaccccaccaccacaacccacccaagacctccaaacaccccctagacctcacccaggcactggtgcagcatggctatccttccacccctcccaaactcccacacaccaggactcccccatccccagcaagcccccctcccctgacagggcactgatccagcaaggaagaaattttagtccatcagactgtggacacagttgtatcttgtggataaaatgagaagaagtgttgtcagctagaaatcaccaatttgtctctatccatataaaataataacaattaaactcctactaggtatcaagcattgggctagacatgttcaagtgagctatctcgcagtctttagccatcctgcagcagggccacatggtggctgggagcaggaagctggaactaaatcacctgcatgggaatcccatctttaccacttgtgagctctctgactgaatacattactttacctaagtgtctttgcctataagaaagtaatatgaaggttggtgagagaattcaatgagttagtgcttatcaaatgcttagaacggtgcctgatgccttataagctctactatgtgtctagtaaatacgttccttccttcctctactcattcaactttaattgagtaccagatatgaacgctgccctaacagctgctatttctggttgagaaaggagagaaaaatgcttccgttttctcctacaggattggacaggaagttctctgttgcctgcaagttatgctcagatagaggagtccggaaaggaatttaccaagcgttcaagtgaagaggaagccagaggggcggggcctccgtgggaggcttcttggttgcggtggggccggggccagcaccctggacagctcccggcggctggcggggagaagaggctttgccaggtcccatctcggctcagaccctcccgtagccttttgctgcaggggcctgacgcctccttgcaaccccggcactcccgtatttggagccacgatggattgggggggcgttgccctctgatctgaaagttagagaatgagggagtttagtgtctttggagcctccttagggagccagcccaggaccttcctcctcccatgggtcttgatctgctcctcacccctacactgccagcgtgcggccaccttggagatggagcagcaggagcacgacgccgtgccgggaatagggaagcagtgtgaggaccacaagacaggtcccccagcctgggtttaattccaggatctgctgctgggagcttgggcaagcacccagcatctccacgcccagcttcctcacctgataagaccaggggaatagcacctacactgcaccaggattgcaggagaatggagtaaaacagcacacacaatactcctggcacaaagcaagtaataaatgagtgtgcctcctgccatacaggaaccgaggactggagagctagtcatgagcccagagatacctggcttcatgctcaggaacagccatgtgggccagagggctggagatgtggtctgcaccttgaaggccctgggaaagttcctgtcctctatgattcctctgttcttcagccactagacataaaaaaaaattgtccttcaagtcctccttcctcctttctttaatcagacaggggaaatagcatgtgcataaataataattgttttgtaggctgggagactgcccctttaagagcctcataatgggagagtcagaagagcccagaggtctcaaacggaaatgactggagaaccagcaagtggcataagtgtgtgaagtcagctggggcgagattgggatgtgctggagagtgtgcatgtactgacgaaaggccatcaaatacaatttaaaataattagcccactccaaagagtcttctgcagcacgcacttctgctaagggctgcagtgagtgggctctcacctcaacctgaaccagacggaggctgaggctgggccccactgaggggctgtgacttgcccaaggtcatccagggccaggcctgtgcccacattgggactcttttcctccctcagacagagggcacttcagtcactgcagagcaggtggcagcagcccttcagtggatgagtttctcctttcccagggtgactgggtgggtgaaggaattgagcaacaggtggccaggctgccgcctctcaccctgacacattggtccccatcccctcatcctacagccatctcagggacagatggagacattccaatgccctccgggtcctccaccaacccagacagagcctggagtcacaatgcccacctagccagagggatcagccagctagccaagtgccccctgtgtctttcatctgttcttcacaagacccacaagtgaaaaatgaggataaaccgcacattctacacacgataacaacatagcaagtccttatactgctcttactgtgtgcccggcccccttagcagtaggtactattattattcaattttacaaagaaactaactgagggacagagaggcaaagtaattccctgcaggtactctaatgagtacgtggcagagctgggagccatcctggttgtctgcctcgaaagaccacactctttgcactgcatcgcggcacttcctgcggggtggggggyacaatgggagaagcatctgcgtctaatgctgctttacttttgaggccagaaaaatgggaaggctcccctctgactctggaagagagacgcaaaccgtaatctcaacaacacaatccccacctccaacctcagccgccctggagcctctctcccgccagtccgcccactggaacacgggttccatgtgccatccagggtcaacgccgctctggggacgcgtcaggcccagcgcacagcctgggcagctcagcctgtcagctgagcacgggcgcctcaaggggtgcggccctctcagaaggaaggtgagtctccctggagcccctgacgacagcgaagcggctgggcgctctccggggagtgggcgcggcacccaagaagggtttcttacagttccaagagaggaccccagccacagtcactccagagcccacccggggcttggaggaggctctggaaaatgagggatgggggagtgtgcagaacagggggcggaggctggcaggagccgagggagggcttggtcgggtgcgaagagtgcctgggaggagttagagtggggagggggtgcggcggcggggagagaagaggcggagctgggggaccagaccgctaaaggagaaagggggattccaggcaaggggaatgtggccaggcagtgcgggagggcggcagcggccaggctaatattcgcgaccccgactggggcgcggcaacttctgccctcagtccccacaagctcccggccgcgattcgcggccgagaaattctgcggaggggccggtgggtcagagccaggccaggcagttgctgagccttcccctcccctcctggcgggagtgtgtgtgcaaggggccagggggcggagtcggagaaagggttgggggtgtccgtgtccagcgctcctccggacgcggctccacaatccagctgcgagaacagatggacgcagcggcggctcacctcgggggcttcctgctcgctgtgcgccgaggtccaggctgaagcggagatcgcaagcctctggctcccgcctctcccaaggggcctcgaggaaccggctgccgcgcycccttccccaagaggagaagagcgggcgctgaccccgcgagtcctagaaccgcgggcggkgggcrggcagggggcggggggcagagggccagctaccggcgcggaacgcccatcccaggggctggttcaagacttycacaccgagagcccttcctgggcctccagccctggagcatctggagagcggacccctgcccggccacgccccgcccccggsccccgccccgccgacgtcgcattagcatgagcgacgtaagtggcccgggcaccactcgggggctgggactcgccgcgtcacagccccgagtggaagggaaaaaaaaagaggaggcggcggaggaggcaagagccgacgcgaggggaggggagcgcagcggcggggctaacgggcgggcaagcgggcgggcggcaacagcatgtccctcggccagcgcgggcggcctcttagcgcggcgggggctgctctgggcgcgccccgggcgaagtgckcccagtctccggccccggcccctcggcgcgcccgacttcccggccgcccctgagcccagcagccgcgggtcccgggatcggctaagagtagctgyaacgcctcgccggacggagtcctttcctttcccgggacgctgggccatgagctccgcggccacctgaggcacaggggagtctgctcggccaggacagcctccccgaagtcccgtgccctcgcctctgcactgcgggacgccagcgctcggccctggcggaggcgtcytcggaagagcatcggggtgggggcatggaatccgcggaacctgcgggccaggcccgggcggcggccaccaagctgtcggaggctgtgggcgcggcgctgcaggagccccggmggcagaggcgcctggtgcttgttatcgtgtgcgtggcgctgttactggacaacatgctgtacatggtcatcgtgcccatagtgcccgactacatcgcccacatgcgcgggggcggcgagggccccacccggactcccgaggtgtgggagcccaccctgccgctgcccactccggccaatgccagcgcctacacggccaacacctcggcgtccccgacagctgcgtggccagcgggctcagcccttcggccccgctaccctacggagagcgaagacgtgaagatcggggtgctgtttgcttccaaggcyatcctgcagctgctagtgaaccccttgagcgggcccttcatcgaccgcatgagctacgacgtgccgctgctgatcggcctgggcgtcatgttcgcctctacagtcctgttcgccttcgccgaggactacgccacgctgttcgcggcgcgcagcctgcagggcctgggctcagccttcgccgacacgtctggcatagccatgatcgccgataagtacccsgaggagccggagcgcagtcgygcactgggcgtggcgctggccttcattagcttcggaagcctagtggccccgcccttcgggggcatcctctatgagttcgccggcaagcgcgtgcccttcttggtgctagctgccgtgtcgctctttgacgcgctgttgctgctggcagtggccaaacccttctcggcggctgcacgggctcgggccaacctgccagtgggcactcccatccaccgcctcatgctagacccctacattgccgtggtggccggcgcgctcaccacctgtaacattcccctcgccttcctcgarcccaccattgccacgtggatgaagcatacgatggcggcttccgagtgggagatgggcatggcctggctgccggccttcgtgcctcatgtgctgggcgtctacctcaccgtgcgcctggcggcgcgctacccacacctgcagtggctgtacggcgcgcttgggctggctgtgatcggcgccagctcgtgcatcgtgccsgcctgccgctccttcgcgccgctagtggtctcactatgcggcctctgttttggcatagccctagtcgacacagcactgctgcccacgctcgccttcctggtggacgygcgccatgtctcagtctatggcagcgtctacgccatcgccgacatctcctattcggtggcctacgcgctcgggcccatagtggcaggccacattgtgcactcgctgggctttgagcagctcagccttggcatgggactggccaacctgctctatgctcccgtcttgctgctgctccgcaacgtgggcctcctgacgcgctcccgttccgagcgcgatgtgctgcttgatgagccaccgcaaggtctgtacgatgcggtgcgcctgcgtgagcgtcctgtgtctggccaggacggcgagcctcgcagcccgcctggcccttttgatgagtgcgaggacgactacaactactactacacccgcagctagcatccccactcctcctccagcccacccaaccgccttggktcaagggggctgctctgcaagcccactggccagctctggctcagggcccacctcctccagcgagtaccccagccactcctcaaccttgacttctgcccaaatcccctccctgtgacccrttccatatccctttctctcttgtccaatggggcttggagcaccgaggccagcgaagccatcgcgctccttgcggaggtgaagaggaccctgagtccccacctgcggctcccctgtgtagagcctgcatctgtctgtccttccttccattgctcccagtgccaaacttgggccgctgcaccgcgrcgcctccgcccaaatcaataaactgtgtctgtcccaggaggccgagtctctttactggtggggggtgcgtggaggcgcgcagggccagagcwgaggggagggtgaactgggtctccaagtcccaatccagacctaagccaaactaacacgtaggcacctgtagctgtttttctacctggaaaaggggataggaaggaagcaaacccaacaaaggctgtcacccacggtcaccaaggagcaccatgctcccctcagcccaggatagaccctcttttccaggcctagcgcagagcccggggatgccgcccgggggagcctgaggacccgctccagctaggcacgccaggccccgccctttgaggacacgccccacaccagcctcagagctctgaggtgcctgggctgagcttcccttcagaccagaatcccgccccgttgaggctttgagaaaggagtaggagcckagcattccggcagaggaagaaaaacggcccatcttttagagtccgacctctrgaaatgtgtgtatgatgtgatgtgtgtgttcattagagaacttgtcctaggaggagtgggggagccgtggttggtgtttgctgtatccctgtcagtcccgagggtctgagtcttgaagggagagatgcgagtgtgggatctggtgccaacccccactgccaccctgtcctgagtgggagcagcggcccaggactgtcaggaaagtttcccatccttagtcccagccctgagagcctcaagccagcgttcgcgcaacactccatgtcccgaagaccgtagtctgatgatcgaggcagagtcttcccatcatagcgtgaagaggcggctggtcagggtcgcctgtgtgttagctgcgcctgtgagggtctgctctgctgttgtgcgcatgtctgtcctcgatctgcgagtcgggctgtgtgtgcctgggcggagtctgcctttgtcggtctgtctgtgctatttctgtgtgggggtctctatctggggtgggggatgcttttgtctgagaggagagcctgcctcttgccgcagtccttaagcatcctcaggtctgccatcaggattgtcccaagtctgtagcaccccacctckgctccccaccccatagtgccagcaggaatgggatggtaacagaaagggaagtcctgcagtgaatattgatcccagttattgtttcttattattattttgaaagatggtgtagcagggtttgagactggcctggatggtggggagaggagggcagcgagcagagacttcctcagacccaaccstctccaggattcagcagcagcaccccaaggctggaataatggggttggggaagtgcggtgactgggaaatgctgagctaggggcaggaggcatgggcgggacagtgttctgtgcccccttctagagcctaaatttgttgcccgagttcctccgggaagcgctccgggtagattctsggggccgggagctgagatccctgggcggggagcgggggaagggatggggctgaggacagcgaagaagagggggcttgggggaggggggaaatggaagagagaggagggaggaggtacaagaggaaggagagaagtgcggccagcttgctttctccagtcgggtggccgcggggacccgggcgasgtcggaggccctgccgggaacccaggctgcagcccccacccccgcgctgcgacacgccccccaccccttccggctcacacccccgcccacactcctgagtggtgcggtgcagcgtcggccgaggcagcagagccgaggagagcaggtgagaagaagggctgggctgggctggcggagcgcggtgccgggagcaagggcggcggtcgggggctctatccagggacagcaccggggccgagaggccccaggactcgtggagtcctctgagtcctgcgcagcagcggccgtcgggggtcagctaggaagctgcaggattgcgttgcttcggtgcctgggcttggggaggcttaaccatcagggcttcgggactccaagcgcatgttctcacttcacttggcccagcrtctgctaagtgaccaggtccgcgctttctgtgtctagtcggagggtccttgggtctgacccgactcgcctgaattgctggttggcaaccgcttctcccgggagcagggggtggggaaggaggagcagtggctggtggcaagtctgagccaggacatagccgatgacagcctgtgaatgaccggccagactggggttggaccttcggggcagagcaggcagcccttggaaagccaggctggcaggagcatgggtgggaggcacaaaacacagacaaacagacatatatacacatacatcctctaggcatctgcccaggagtgatggaggaagaagagttggtaggtgggaccaccaggaaaccatcccacccagctctgccttcttcaagctcagggtccctgaagcctgactagtgtctcccgaatgggggggaggggggggctctgggccagagcaaaaggaggcattggctgcatggtctgtagggcctttaccaacctgaccttgtccttgctgtcctctcaaaagactgccatgctccggtgaatcctcaccaggacgccacctctttcactttgcagttgggggcagcccctacgaacccacagcactgggaggcgtgggaacaagcctgtggagagtgtccctgcactgtgccagcaagggctttacattctctgcccagcactgcaaggcagccccaggctcctccatccttgggcctggttcatccatctttctggactctctgttcctggcaacaaccctgccaggtgcccatacatgggcggtgcttgcctctgggtaggggtggtgttgggtggggagaggggtgaggaaattagctaaacctcagctttagacttgagagaatagagggtgggctggtggaaaacatgagtatgtgcctgtggaggcttaggttcagggggatctcagagggtagcaattgtgacccacagcctaataataacagtctttgccctcttggcctggctcacttctactgtaccttcaaaattaatctgcctctccccagactaaggcaggtgrcccctaggggccctggctgcccagcctccctgcatacctccctgggcactcctatggcatctacactggcagcctgcagacccgagactgcmtaggtcacaacgcctccagcaggcccagagtctccctgccctggccacaggccaggctyccaattagcccagatgcatcctggagcacagggccttaaaggcctccattcacccaygcatgcattcctttccctccaccaacggagtgagggaattcaccctactccacaccagagatgtggccggaatgcagaratgaagcactgagcacagtaggtatggtcttacccttgagaagctagtgggaaagagagagtttgattggcaaagcacttatctattgggttccaggcaggaacaaaggcagcactctgccagcaamccctggtggatttggattgccccagggtggtcagctggccttgggtgacaacagactcatgagagcagaccctcactttaggaaccactctctcccatatgggggcccagagagaacactgtggtcagcacgtacaggtggaagtagagactggggccacgcctgcaatgagacccctatacacagctgtcaggctctggcctcctcatggggctggggtgggggtctgttggcgggaggtggagggtttgtgacaggcctatgtggctgctgtgttgatgcttcccacttcttggtccccaggtccacacctctgcatccctgcaccaggactcaccaagacgcccatcctggaaaaggtcccccgtaagatgrcagcaaaaactcccagcagtgaggagtctgtgagtgacttttggagccctctctcaaccctgctttccccacctacatgcccttgcttctagaacagtcctgagtgggactggcccccagcatttgcctggccccagccctgccctctactggcacaaggcccaggctacagctccacccccagcttgctgaggatcccagaagggcctggaggggctgagacgggcctcagggtgccaaggaaatgctaagagcttaacttccaaatcccctggccaggctaggccctatctttccttccagggcctctcttcatcccagcttccacttctgatagctttgagcccagtgattttgccttagggtggggctgaattcctactccaagccctgcaagtcccagctccagctgctatcactagttcagccttggagccttaggcaccatgttctccactggcctgagacaatgccatcctccctgggcaggcatcctccctcccgccccagccagccttcgggtggcagagcaacacacctgayttcaggtggttgcatgtgtttcccctctcccacacttgtctttttgccactcctcttcccccttcccccttcccctttcccccagccctcatttgaaaccctgagcagaattttctggcttctccccaagaagctgttcactccattgccctgaaytctgcagctgacaaacatctattgtcacctctggtccactggcatgcttctctacccaccccattgggctgtggcttccttcagagcaggctctgtttctccatcgtctctgagtccagcccaggatctgactcacatgaactgcccaggaaacatggagttttggagcattgatctgagactcccaggtccaaagacactccttagcacagggccagaagtccaggagagtctggggaggatccctggggggttgagatgtctgagctgcgatttcctgctttattcctttttacccactgctgattccctgttagccaggctaagtcacagcgcactgtcagagcctggaagaaggggagcagtgtctggcagaggatctagccagacttgtgggcccttttggccaggtcactaactgggctgggctttctgtaggtgctcacccacccatcacacagascaccccccccaccgcaagagatggaagaacaagatcagctgggttgggggcccagacctggctcactggggttgggcagggcagtctgggatgctgtccagatccatcctcgcatcattccccagggcaggagcagcccgtagttggcactgacaccccactgttgccagagaagtgaaccctagaggcaggatcagacaggcagagggccgtcattcatccatcagcagcaggggcagagaaggaggtgcttttaaggggcccmttcactctgcagcctatggggaggaaccctttactgtctcatggaaactcatcactgcacaaagaagcccctgaaggaaggtgcctcactgtctaccagtgtgtcccaggaaccatgttgcagaattctggtcattagggcagcaatgaattatgtctcttatccaaagccatcttttatccttccaaatctctccacaagagtacacccttcaggtccggagatcagctagattctggagccccagctgagaacagtttataaattaagactgaccaggagacaacaatatcaataacaggactatttcatcttagatctatcctttatggcttaaaagcactttcacgtacattagctctttaatcctatgaaaggcagggtttgctacccccattttacaggagaagaaactgtacaatttaagcaatattattataagttctgccttcctattgtcactggccaagtgagggacaagaagaggaaacgaatggaaaagggagtgaaagggaagggagagaacgacccaggagaaagaagcagagtggrcatggaagactgattttagctcctagtctgccatcagatttgtatgtgaccttggaccagctgctccactctctgggactcagtttcctcattcataaatgggaagtcacaaaattgaagccacacagaagccttctgtggtgaacgctgctggtgaactgagaggcacagcatgcgtatagaagggtggagttgggggttcttcctagactctagccacactttggggcccccaaagaatatgggtttcctcttgggaattcstctggaagtataagatagcgaggtcataacattttagatgtgcctatttgaggccagttgttcccccatttaattctctctgtgttcctctcaggtaggaattgttatttatgtcctatggatgaggagcagaggcttggagagattcggagaggaaggacatccactgcatccccacccctgcccctaacacccacatgaaacaaaattccctgcctgggttttataagtaggagggacttataagaagctcagggcatgaatcatcttctgaggaaccctcttttagaattctagtcattagggcagcactgaattatgtctctcatccaaaaccatcttttatccttccaaatctctccctaagagtgcccccttcaggtccagagatcaatcagattctggagccccagctgggaacaatctctaaattaagagtcaccagcagccaacaatatcaataacaggactatttcatcttagatccatcctttatggcttaaaagcactttcatatctattttctgtttgatcctatgagagataggggttactactcccattctacagaggaagaaactgaggcacagagggaggctgatttgcccaagtttgcagagctggtcagtggcagggtcagggtagaaacccaggtctgtctgatgccaatatcaccgtattttcctctgcactttatccctttctggggacagagcacaatgaggtcagggacgccaaacaggaacttcctaaattcataattttgctgagctgagccctagaaatggaggggtcccagggtagagaacaacacaggggcagaacaatacagatactaggsaccaacttggggacaggnatggggcgcacatactagaggcacaatgcctatgaaccctttcttccaggggctgcccaaactgcccgtgcccccgctgcagcagaccctggccacgtayctgcagtgcatgcgacacttggtgtctgaggagcagttcaggaagagccaggccattgtgcagcagtttggggcccctggtggcctcggcgagaccctgcagcagaaactcctggagcggcaggagaagacagccaactgggtaagaggggcagacaaggaacccatagaagaggggcgggaggcagacctggagacagagggatctcggtgagaggcaggtaggggacaaagacagggcagmaggagagatgagggacagggatgggggataggtgtgggaacaggcaggtggcatggattggaggacaggaagggacaaggatgagaaacaaacaagatgaggaatgggaaatacggatagagaaagaggcggacaaatcggggacaggaattgggacagatgaggacagagatcgcattaggaaagaagagagggtgaaaggcaggaagaagacacctgtaaggacaggcagaggacagcgatgtagcaccaagccaccaggatggggactgggacagaagaaaggagacaggagggcacaaaggtgaaggacaggcctggtggactgggaagctcctggcacatacctggggcttagcatatatttgtggaatgaatgaattaatgctctggtgaagtgtcccgattttctctcggggctgtcaggatgggactgtttggrgggatgtgacggccttccctgccctccccggcaggtgtctgagtactggctgaatgacatgtatctcaacaaccgcctggcccygsctgtcaactccagccctgccgtgatctttgctcggcagcacttccctggcaccgatgaccagctgaggtgaggccttggtgctcctagctcataacctggggacccacccaaggcaggggcccttaccccagtgccagcaaagaaaggccaaagctggagcctcggctgagcttcctggggtcaaatgccccgagacagtggacgtccaggccatcaggtggggagcaaggttaggtgtggctgcactcgagtgacaatcacacaattagccttagtctatatttatcttgcagtggaatggacactcatggaggtcatgggtccaaatatccccacagcctccacctggctgaggccctgggaggaggcgtgtgtccctggaccacgccagtacttgtccctgggaaacactgccccaggctgtctgagagggcctctgcttccttccagagcccccagctctaaacagaggccccagaaggctggaaacaattcctccctgccagcagccagagcctgtgccatctgctgtaatttcagagctcactgagccgttggaagggcctctggccgctaatgacaatggaggatgggtgcagggagaaagggtttcccttctggagtcactcagagtctggtcttaagacctgagtggggcaaatggtggggacggtttagagggagggcagaccaaagtggcccgaggacaagaggcagggcccacctctcctctgggcagggcttagccatgctaggaagacctccccaccccaccctaccagctggccagccttccctcccactgtagctggggtctccccagggaagaaggaaggtgtggacagatgaatgacttctgaaaacagttctcacaattgcatctgagrgggtwttttcctcctggtgcaattaagccaggcccagaatcctggtatgacagttcccgctgctcgtttctccagtgcctttccccaagcactcgatttccttttcattagtaccggggggtgggaggaaagrgaccaaattactggcttttcccaggagaaaattttccacaaggccaggggtcctgccctgtccagacccagggctggcttttccaaggaagaactccacccttcaccctccaccccttctggcctgctctgtggcctctcctagcttccgtctccctctctgctccctctcctcttcaagatgattccagtttcctctcccttccccaagagctgctcgacccccagttctcaccaaaggaccattttgaatccaaggcttgtggtgggctctcggcatkgggctggggggcaagaaccacatctgattagtgcaggaaccacatctgattagtgcacacgggggcggcatacaatgggcgatcacagagtttggcagtggggatgagggagggaggagggagggagaagggagggaagaggaaggagatggaaggaagagggaaggagggaggggaggcagaagggagggagggagggaggaagccaggccctgggaggaagggctcaggcctcccttctccctgcaggtttgcagccagcctcatctctggtgtactcagctacaaggccctgctggacaggtaggactgggagggtggtgccctgttccagcacagtctgcctatgcgtctatctcccttgcagggaccttgtctttttccagctctgtattcccattcctggctcctggcacagagcagatgtccctgccccaacccactcccccaccatcaggatgacctttagcctggctggcctgtctgttaactgttccttttcctgtggcaagcaccatccttccttgatcttttaaaaatgtctcctccctccacacatacgtgcacaggtggagtgaattcacttgaagctggagaacacataggaaggcggggaaggaagagttgttagagtaaggtgatgggagttctgctttgccacttggaggaatggtgtctccagcgggagactgtatcctcaatcccaccaagctcagtggacatgaggctgttctgacagatggagagggctgctcaagcaccgcaggctctctttgattttaggaagaaagtccctctcctggccaagcttaggagagcaggagggtgtctgagagcagcagggagagtaagcgggtctggaggacccaagtctctcaaggtagagactataagggcattagaagctggaaggagagagagaggcccaaagaagcatcccttgcacagatgaggaagctgcagctcagagaggttaagtaactcatccatggttacacagccaggtggtggcagagcaaggagggggcaaggggcaaacttcactctttgttcaacttgactcaattcagtctttacccagccttgggacagaggctcagacccacagccccttccagggtagggctgttccctctggagaggggcaggcagagctcccagactgtcagggtggagcagttcaggctgtccagggcattctgcaccacacgctcctgtgtgctctgctcactcctctctaaatgccatgggtcactaggccctgggctgttgtctcctcatggtgtgtctttggtctctcccttcttcgtggacagcattctatttcctcccagaactcgcccctccagctcaccgtcctgtctgttttcaaacaccattgtcttgctgggcctggggacttggtgcccattcatcactgactgcccccacgagaccactttccttctgatcccagactttcacatgtgtgtgcacactcacacagacacgaatacccatgcatatccacgtggaggttcccatgtccaatgattgaaaaggacttaagactggaacattttcctgagtgcctgttttgaacctttaattaattaattaattaatttacttattcactttgcaatgtagttatgctgggaagaggaagagaaataaggcctcatcctcccctcaaaatgtccttagactattgggcaagacagtcacttaaacagacacaaaatacagctgtgtcccttcccctgagtcccacactcgctcatccaagcctcagccatccccaccggggtgtctctcagtcattacaaatgagccaggagagcttcgcctctccctccccattccccaactcctcccataccttgtcgagccatgtccgtaagtgcaccagcacatgccctgttggtgagtctgggaacctagaagtcacctgtgcttgttctgctttctcccttgcaccttcatgtaacccatggtgctcagatgtggtcattctccctccccactgtgtccccaagctccctcctccttccctgctgccctcacaagacatcacgttccttctctgccacaacctccttccttgttcttcctgtgacacctttcagtccattctccccatataagcagggtcagtaaaacaacaaaatggaaacccagtcatgcccctgcgtgctaaagcctcccaagggctttcactgcaccaagaataaggygatagctcctctccactgccactggagccccacaggacctggcctgcccacctctctggccctgtcttcactgggcctcagccccactggcttctctctgcctttgatcagtgcttctcaagctgcctctggggaagaaccaatatattttctttcattttgtaaaatttgtgaaaaacaacaaaaaattgattactagaaaaacggtatgaaatatgagaccaaatgttttattacaggattcaacagacataaaactcccatcacattgctacaaacatttctgggttcaggcattacaccaagtcatgggtcagtcacagcagttcagtgcaatactcatactttgagttgcagtgctttgggacacttcacccttagggctcagctcaatcaacctgcctcagtgagactgcccctggtcaccacctcctgtccctgccaacactctgtctcactacctgacagtctcctgttcactggtttgctgcttgtggtctactccctacctacacatcctaggacttacaccccagtagagcaggagctgcatgtcttatttgctgccatatccccacatcccagaatggtgcctggcctatacggaggacgtgcttcacaaatatttgttggctgaaagagtggaaggaaggaaggatggatggacggatggatggatggatggatggatggaaagatggatggatggtggatagatgggtggatggtggatggatgggtcgatggaaggatggatggatgcttggtggatggatgggtggatgcaaggatagatggatggtggatagatgtgtggatggtggatagatgagtgggtggtgggtggaaggagggatggatgtttcgtggtagaagtatggtagatgtatggatatatggatggatgatggatagatggatgggtggatggatggaagaaagggagggagaaaggaaggataggcacaaggcatgctgagaccagagggaaaaagaacttcctgcattgacctcagaagaggcttctaaaagagatgataaaggagtaggctcttgaaggaggggaaggagttttctgaatagaacagttgagttctggggttggggcaaaggcacgccgagagaagatcagcataagcaaagatgcagaaggctaactggcaggctttgcacatgccgtgcatgaggcagaggtttgagaaaactctgarggtctccacgtgttgtggaaatggggcctccactactttaaaaagtggagaattgagctctgcmtctgccatgatgatgcagttctgggttctgtgccccattttgcctgatcaagttacaataaaacccattctctgtctcccctcaccacccaccatcccctcgtggctgyctcccttcccactcctctccttcagccactccattcccactgactgtgccaaaggccagctgtcagggcagcccctttgcatgaagcaatactatgggctcttctcctcctaccggctccccggccatacccaggacacgctggtggctcagaacagcagcatcatgcyggagcctgagcacgtcaycgtagcctgctgcaatcaggtaagcaaccccttgtcttggtgagggagggcacagagcatacagtggccatgcgttcacgtccattaccttctccgagggggctcagcctccttccctgagtcacacagggagctggggcaccatgtctccaaagtggrgcccctacttccagtcagtcccatgtctctccaccagttgccttctaagaatgagagccgtcagtttgagaatatcctcactggactctcacttcagcactgatgcactgagggtcatgatcgagacctccacctgtacatctgttcttttccatgcagtcacccaggctctggcctttctggagaccacacacagacagacagtgttacagactgacaaataggacctttcatgtgtcagcctgtgggctcagcacttaacatgcattcatcccacttaatcctcacagtgaccatgcagagggggccttaggatctctgtgtgacagttgaggacatgagactcagacaagttaagtggtctgtccaagagtgggaaggaatcctgggtctggccagtgccctaaggtcatgctctaccccctgcagctcaggtcctcagactgggttccacagagccaacaaggacccatgggtcctgggggacaggctgagcatgagggctcctgacctcttccctgtgcccactgcactatatattccatatattgagcttcacataaatatttcctctgacaaacagttttgtttttgtttttgctttgctaaaacccaagtttggcaaccatcccagggactcccctggtacttgctctacaatgtgatcctgggctctcctcacatttttagtaagttgggagctctgtggagccctgacatctgagggcagctgtgacctctgttcctagatttgaaggccatctaggagctctcgcagcccacctgacaccttggccatagaccaaggacgtttccccatcttcattcaaaagtcaagccaagtatttcccagctcccacaggccaccgtatccacctcttccagacatgctctgggcccctgcacaagaccaggccatacagacactgctagggggttggaggggaagggaaaacaaggtactcatgtcaatcagctgaaaagtgtatcttgacctgggtctaggaatagacccttcacaaagcccaaggctctagccttcaaagctacaaaatgacaaaaccacagggctgacatacaaagcacatgtaggtatacatgtgaaggtgcacacacatgcacacatgtgtaggtgcacrtgcacgcatggtgtgtgttggttttccattttaatcttcctctgcatatgattgctggcttgctttttttcctccactcaccagtgtgtttaaggcccatcactgtggctctatctgttgctaattcactcttttcaatggctgggtagacatgccctagacatatacaccacatttcacttagccattccccttctggagaacagtgaggctcttgctaccattttgctgttgcaaacaaggccgagaggcacattcctcgtgtcttccggtacacacgggtacrtttctctaagcctcaggctaaaatatgcatttataagtgcaattgcttagtcataggtatgcacatttttagttttgatagacactgccctccaacagtagctgtgccaatttatattccattccccacaaacataatggattccgtgaaccatgaaacacattttcttttggctaagtttaatgttgccttctttgattgggggcagcgtggaatccagcacagtcaacagccttggcttggtccctaaactgagactagaaccaccaaacaccttgggaaccttgggcctgagcatccctgccccaagcttacctgtgaaggctgagtgaaggcctggtgccacrggccacccaacaagtgacatgtttgacctgtttaccccacagttctttgtcttggatgttgtcattaatttccgccgtctcagtgagggggatctgttcactcagttgagaaagatagtcaaaatggcttccaacgaggacgagcgtttgcctccaattggcctgctgacgtctgacrggaggagcgagtgggccgaggccaggacggtcctcgtgaaaggtcagccgcagtgcccagcacatctccatgcccatctcatgctcrtgcccattggctttccctcctctagggttgggccagggcctcatccccatcagccatagtgtgggagctcagggcccacagcatgccctgmggccagccacagtgccttgccaccgaagccaccttttgtgccctcgtgttccatctgacagtatctggctttcttggtgggactaactagtgctggaattggggatgtctgagaatactgggcggggcgggggagttagctggaggaaggctggctgcaagtgagcaggtgtgttttcctggtgggtggcgctcactgatagtggctgggggagtcgctgaatgggggtgtgggatggagcctgcctctgggaaagtggttcaccacctctttcacctgatctctccatcctgggactcttcatcttcaagctgtcccttatcttgtggcactgttctgatgaaagtctccaagcattcccataagaaagccaggaatattcttgaaaatttttcatcacccttctggaaactactttcaaatccaaagctggtcctattccaggagctgatggaatgctctccttccttgcccatgttagagacactggatgagaagyaagacttctgtgagtctttatttacccctcagaattttactgggtcaggcaatctattcagactctccacatctgttactgagggccctgggcttggctcagggagtatgggagacaaaggagttgaggcctctacccaagagcagccccatgatgggaacaggaagagggggcatggggaggagactcacatccaggtgcatgcagtgctgacccacttcagacaggcgtcaaaaacgtgctccaggacttcagagaggggacgcagcccttccgagtgggattgtgaaaggctctgttagaagaggtgggaatggaacaaagccccatggcatgagtgagaaaggctggagggaaggatggtacccaggcaggcagaccaaccctgggcaaagcccgaggcccagcagggacacacccaccttacccccagggtgaggaggagaatagctgcccagcaaaggtggcctgagccggatgtactgggcctattttttctaacagccacttgcattttctggtctctctctagaagggtcttcccccagatccagctggctccttgccgcacgcagagctcagcccaggtgtccggcctcaggcctgccttgggcatccttcccgcacactctgtcactgtggcccgttcgcttaccttgactctgttgctcactctctgaggacaactttgcatttgtttgataaatgctgattatctgcctttccccccacctcctacccactgcctataaggtcagaaggacaggggccttgtctgtttggtttaatttctgagaaacacagtctgggcccagttacatttattaaataaaagagtgaagggtgattaaaaatgccaggccccagacttattccccgacttaccaattaattattctttcatccaattattgggcacctcctgaatgctgtcataaatagggggctgcaggagccaaagaggggtgtgagagctgactgccctcccggacctaacctcgtgctggagaattaataacttagcattccgcagtgagttaattccctcgggagaccatggtgtaatcaaatcccactcttctccccttcagggacagagacaggcatcaaaataatcgcctctgcctccagcatagtttccactttattagcaggccaggcccaagacacgcccttcagggctggctggattgccccaaggtctgagcacttgggctgcagatcagaattgatttgttaatggcacttgatctggctttctgaatggaagtgctgtttctgagggaaatgcgacagaaaggaggggacacatgcgcctccccttgggtaatccgattaatccagttagcgccaactgtgtcatctacacaacaggaaactgatccttcacagatcccccctccccagagcagccctgcctatggaacagaaacagagagaccatttacaaaatgatttcggtttcccagtgaaagagtatggcagcttgggacagggttgagagtgaagatggagagaccagtgacgtcaaggccattgaaagcgagaacaattcctgggctttttatccgagccgtgagtggatgttagtgccatttagtaagatgggaaacagggtcggggagtgggtacaggatggagaaatcattgccacacatgttgggttagaggtgcttgggtcatctgggtggagacgtcaagcttaatatatatgtttggagcccaagggagaggtcagtacagagcaataaatttgagggacatcagcgcataaatgatccttaaagtcatggacctgggtgagataatctagaaacagaagaacagggagcctggaggtcaggtagagaaggatgcaaaggggattgagaaagagtagcccatgaagtaaaggaaagccagaagagtcacaaagattcaagacagagggaacggccagccacatggaatgctgtggagagctggaggaggaacaggacacaggggacccggcttggcaaccctgaagttgtcactgggcttactgagggtcagactggagtagcaggagaacaaatgcttgcacactgacagaagtgatccaacagcagaaagaaattgtcgatgaggcagtcagtgagttgaaccagtgagtatggtcgactttttctcagacattttgayactaaaaggagcagaaaaatgagggagttgctaaaagaggatgagggtcaagggaggtgtttttaggaggagagacaaatgtatggaaggaatttagtaaaagaaattgatgaagagataggagatgaatggaggggtggaattcttgcaaaggcaaaaggagatagaactcagaaaataagaggcctttggttggtacagggtgaagtggaaagcttgggcctgaggcagcagaggtaggagcrtgcagaggctcccaactggtacctcctggtctcagatcacaaccttgagataagaggcgggcagttggatgttgaagatgaaatcgactgtgtgaaatagcctcctggaaagtgggaaagaagacttgaaaaacttgataagatttatggactgtgttgagctcatatatgaaggttcaaagtgatacattttaggagaggctaattaacattgttatgtgatcttccccaccaacgctcagctcctcaggttcagccagagttggtgagtgtaactggtagggacggtgaaggtgtggccaagaacggtcatgctggaatctgagctgagtaaggaagtgtgttcaagtctgctcagcaggttcaagtctgctcaggcagccgtaacaaagtaccacagactgggaggcttcaacaacagacacctgctatcttacagtttagcaggtgggtttctcctgacacctctctccttggcttgtcgatgccaccttctctgtgtgtcttcatgtggtcttgcctctgtgcrtatctgcatcctaatctcttcttataaggtgaccagtcatatgggattaggcttcacccaaatggcctagtgtaacttaattgtctctttaaaggtcccatctccaaatacagttacattctgagcttctgggagttaggacttcaacacaggaattttggaacgacacaatttggcccataagaggaatgaagtgacagacagggtaaatgacagatggtgagagcatagcagggccgaggggtttggccgtctcagtgacatgagatgtgttcagtgggtatcagaggatgtgaactagaaagccaggaatgtggtcagagtgtgggatgcttgaaactgagactttagaggtggtgggctcatggtagagagaagttcccagatgtgatactggccatgggtgcaggggtgagactgtcaaaggtgtggagatggaggagttgggagaggaggatggagactgggcgtccacatggatgcacatactaccataacgatgattccagtagcatgggggaagcaggtgaattgagagcccagatattcatgatggggacctaggaagatattggcgcagcacagaaacaagggggatgatggttattgggggggtaaaacctaacagctccagctccaaaacaaagtgggatgagggagggggagttgtttagaagcaggaacagtagaaggaagctgtctaccccacctggccctggggtgcatgagtgtggaggaaaacaacagcatgcttgagagggtggcaggggagcgggcacctcaggggagcacccctcgggaagtgccacattgcagttgaggcaaagctgggcagacacctacagaagagtttagccatgcaggggaatggcccgtctgagacaggcatgaagcgctccagaaggagtaaaggacaagtgtgaggactgcatgcgcgtagaggacacatggcctggggagtggggtgatgggggagccagggagcccccagggtggttgcctagtgtggctgttggggctgaggtgctttctcacccacagcagtatcctgattaactccacggaaagggttgagctattttaggggagcatagctcccaaccctctcagctgaagccctaagatcctgcccccacttcctggagcctgggtacagggacagtgctcatgggcacagagtccaggcaagcactcactggcaggaggccttggccaagctgagctcctctcagcctggtggaggtctagaccaaggagmctgcgctcagatgaaacacttccccggattctcatgtggtcaactaaggcctggggcaggggcttttccaccccraccctccattttatcaacctctctccttcaagacactgcccttgagcctycaccctgcccccaaccaggatgactccctcctgtgagccccaggctgcttagcctgaccctctgccacgacactgagggcatgaggcccacagggttccagggactgccagggtggcacagcccacgygcaggggagcagggctgcctgccgcacccctcagctccagctcagacatgggctcagacacggtgcaggagtgtgtgcactgacatcaacgaaggtggcctgatcatccacaggccactaccagtgtcctctgggggcccaaagcaccaggatacacaggctaaaccaaagcagcaattcagacagattcctgaggggctgggaggccacgtccacagaggaacttgaagctaaagccaggtgtgctgaggccagtgtgactcagccctaattgcagactggggttggatgatgacatcaggattgtctagagcattccttaataaaacaaaataaaacagattcccgggccccagtgcttttccagagggacagagtggggccaaggaatctatttttatagcactctggtgttttcatgtgcaggccaggctgggacctgcttactcggatattagcagagcatccaggtccccctctggcttgctctttcctgggcaccttctgtcttttgttacacctgcgaggtgggattttattcccactgaaccgaggaagaggctatgtctgtctcctttaggggtggccgggggtgaagcaggatctgacactggaagggagcatctgcctagccagcctgagacctgcagtgccagggaggccaggtgggattctgaagacaggcttggggcctcagagggagcctgcacaccctattaggacctccctccccactgcctcgaagctgtggccttcctgaacccaggaggagccaacccgttatcctggyctggaaatttaattagacattcagccccgagtmtgggagactacagcacttgtcaatttgtaggaaaagaatggccagcttggagagccccccagccctctggctttcctgggtgctgccgtgaagagcctgtgaccagacctcagaggcagatgcttttcgtttacacagtcccgtaaatatttatccccgacagtcaattagagctgagccactgcttgcaaggagggaactgacagaaggcggctacagctgcagaaggccatggtcatggtttacaagaaccactcaggatgggggcattttgctatttacgtatygtcatccagagctaggcatgtctgctgattttaaaaccaattacacattagcactaacagcctctctgatttaattggcccagaaatacctcccgagctctcaagactgaatgtgattttcttgctctggaaaggggctgggccaatgcctccctccttcagtaggagaatgaaggcctttagggacaagagcatccaggcaggaaaggcaagtggtccagggcaagaggcctgcccttaacctaccacggctgctgtctcctggggcctgggcttcctagtctatatgaagatagcagtctgccctgtgggcaggaccaaggggatgggcggtaaagcagatgggctggcgcctggcacacagagggtgttggctaaatggtagctcttattagatttggggatcacgctggggatgctttgcccaatgcccacaacccctctggaaaaatctggtgaacttgaacatgagtactgtccttgtggtcagaggcaggggcccgtgggccctcaggctgctttgctctttgcatggaatcctaatccctatgaactctgtggtgcattttgctttccctgggccctccacgtaccactctctctgtgtgcacacacactgggctcctctctttaccttctccctagtcaccatctctctggccctcgttttccattttatgtgcagcacagtaatgtttggggtacaagatagctaggaggtggttttttttgttttgtttttgtttttgtttttgtatctcctgcctttctcccccaccatcctttcccccagttctggaagcctgacagctctttataccctctgcctttgtgggaagagtggttagaacccagaagaaagagcacttcttggttcttaagttcttttttgaaattaaattgtacttattttgggataactgaagattaacatccagttgtaagaagtaatacagagatctcatatgtacccatcttccaccaatggtagcattttccaaaactatagtayaatatcacaaccaggatactgacattgatacagtcaagatacggaacattccatcaccaccaggatccctcwtgctgcccttttataaccacacccacctcacccccttcttaactcctgggcaaccacaaatctgttctctatttcaataattttattgcttcaggaatattatatacatgaaatcatatagcatgtatgatgcagggtctggcttttttcaaacagtataattctccggatggagatttatccaaatcgttgcatgtatcaacagttctttcctttttattgctgagtgatattccatggtgctaggtatcagtttctttcattgtttacccatcaaaggacatccgggttgtttccagttttgagctattaaagctactgtgaacatttgtgtacaggtttttgtgtgaacctatgttttcacttactggaagaaaatgcccaggaatgaaatttctaggtcacaccataatagtatgtttagttttttaagaaactgctaaaatgttttccagagtgactgtaccattttacattcctgtcagcaatatatgtataatccagtttctatgcatctttgccagcatttggtggtgtcacttttttttattttaaccattttgataggtgtgaagacaatgcaatccaccacattaacagactaaagaaaaaaataacatrattatattaatcaatacagtaaaagcatttggcaaaattcaacaaccattcatgataaaatctcttagagaactaggaccagaaaggaacttgctcgacctgatacggaacatctacaaaaagcttayagctaacatcttatttaaaggtgaaagactgaatgctttccccctaagatcagtaataagaggatacctactcttaccactctgtttaacacagtattggagttctggccagtgcattaaggcaagaaaagggaataaaagggatacagatcagaaagaaaaaaattaaatgatccctacttttatgaaatgattatgtatgtagaaaatagtagcaaatctacaactccaaaaactcctagaatacatgaattcagcaaggttgcaatataaaagattaacgtacaaaactcaattatagtctttcgcctttaaatatgatgttagctataagctttttgtagatgttctttatcaagtcaaggaagttcccttctggtactagttcaataagagattttatcatgaatggatgttcaattttgtcaaatgtttttactgtatcaattaatgtaatcatgttatttttttctttagtctgttaatgtggtgggctacattgattgattttcagatattgaaccaggcttgcatccctgaaatgagccccagttggtcatggtgtataattcttttcatatattgcttaattctacctgctaatatgtagttcagtattttttccatctatatttgtgagggccactggtctatagttggtttggttttttgtttgttgtactgtatttatcttcttttggtatcaggatacctgtttcgtaaaataaattgggaaatgttccctcctcttatattttctgaaagagattgtataaatgtggtatcaattcttccttaaatgtttggtagaatttttcagtgaaattatttgggcctgaagatttcttttyggggagttttaatgttgctaattcaatacccttaactcatttatgcctagtgttccattattagaacgctaagcttgtgggagttatttatgtcctactgcttaaggtcatcaccaaggtctgatttttcacacaaaaaaatttgcaacctccagcataaacgggttaataattatagggctattcaaataatcataatattcaatgcattgtggtagtttatacttttcaagggattggtccatttcatgtaagttgtcagatttatgtgtatagaattgttcatagtatcctcttattatacttttgatgtctgcagggtctgtagtgatatcctgtttcattcctgatattggtggttgtgtctttctccctctctttttttttttgtcagtctctctatgaatttgattgatcttttaaaataactacctttctttttgttgattttttttcctgttttcaactgtattgatttctgctctttattatttccttcatcttgcttgctttgggtttttttctgctcttctttttctaggttcttcaggtaagaaattattgatttgagacttttctaatgtaagcatttaatgctataaatttccctctcatcaatactttagctatatctcacaaattttcatatggtgtattttagttttcattcatttcagtgtattttttaaatttcccttaaaactctgatatggtttgtctctaagtctccacccaaatctcatctcgaattgtaatccccacatgtcaagggagggacccggtgagaggtgattggatcatgagagcggtttcccccatgctgttctcatgacagtcagtgagttcccaggagatctgatggtttaaaagtgcttggcagtcccccccttgttctctgtctctcctgctgccatgggaagaaggtccttgcttccccttcgcgttctgccatgattgtaaatttcctgatgcctccccagccacgtgaaactgtgagtaaatcaaacctttttattcataaattacccagtcttaggcagttctttagagcagtgtgaaaacagactaatacagactccctctttgacccattcattgtttagaagtatgttgtttagtttccaaatgtttggaactttttatgttatttttctgttactgatttctactttgattccactgtggtcagataacatattttgaatgactttaattcttttcaatttgttgagtgttgttttatggccctgggtatagtctatcttggcatatgttcgatgggtatttgaagagaatgattgatgatattgttgatttcttctacgtccttgctgaatttctgtctagtcgttctaacaactgttgagagcggtgttacagtctccaagtacaattgtggatttggctatttctcctttcagttctgtcagagtttgtttaacatattttatagtatgcttggtatagatgcatttagggttgccatgtcttcttggaggatttatccttcacttttatataatgcccttctatgtctctggtaagttttctttgctctaaagtgtactttacctgacattaagatagccatttctgctttcttttgattaatgtttgcatgctatatatttttccttccttttacttataaccaaactatatcattatatttgatgtgcacttcttgtagacagcatatagctgggtaatgttttgtcgtatattccatcaatctctgtcttctaattggtgtatttagaacatttacactttacataattatcgatgtgttagggcttaactctgatattttagtttttattttctgtttttcaattattgttctctttctcttgccttcgtgtgggttacccgaacattttttagaattcaattttgatatacctgtaacttttttaaaattatctgtttgtatagctttttctaacagtttctgtaggtattaccttgtatatacataacttatcacagtttattagtgttgaaatgttaccagttctagtgaagtgtagaaagcttaccaccttttattctcctttgtttataatacacttgtcttaaatattatctctatatacatttagaaccacatcaggcaattttatgatttttgcttcaacattgaaacacagtttagaagacttaaaaggagmatgaaaatgaatttatttactcagatatttacctttcctattgttctttctttcttcttgatattccaatgtttctctttttaccatttcttttcttttaaaaaaaactttcttagggaccagctgcagtggctcacgcctgtaatcccagcactttgggaggctgaggagggtggatcrtgaggtcaggagttcaagaccagcctggccaagtagagacaaaccctgtctctactaataatacaaaaattagcctggcgtggtggcaggcgcctgtaatcccagccactcaggaggctgaggcagagaattgcttgaacctgggaggcggaagttgcagtgagccgagattgggccactgcactctccagcttgggtgacagagcgagactccatttcaaaacaccaaaaccaaaaacaaacaaacaaaaaaacactttatttagccattctttcaggatatgtctgcttggcataaattctcttagttttcctcatatgaaaatgttttgatttccccttcttcatttctgaaggatattttttcttgatatagaattctggattgatagttctttttttttcagcacttacaaaatattatggcaattccttctggtcttcatggtttctgataagaaaaaaaaatctgctgttgtcctagttgcttttctcctatagaatatatatatagtatatatatcacacacacacacacacacacacatatgggtgtgtgtgtctatgtatagatacatgtgtatatatgtatatcatttctctcttgctgttttcaagatttttcctttgtctttatttttcaaaagtttgactatgatatgttttggtgtttgcttctttgaatttatcatgtttggggttaacttaccttcctgaatctttagatgtgtgtcctttgccaaatttggggatgcgttagccattatttatctgagtcgtttctgctctgccctctttctcctctcctgggaatttggtgacataaacatcaccttttgtctcaaaggtgccttagactctgttccttttcccccagtctaatcagtgttattccgtcttcaagttcactgattcttttctctcctccytaggttctgctgttgagtccatccactgcgctttctatattggttattctattattcagtcctaacatttctatttggttcttcttatatattttattttcttgctgagaatttgtttctttgtggagacttcttttctttttcatttgtttcaaatatgttaaaattgcttgttgaggcttttttatgattactgctttttatttattttattttaattttatttatttatttatttgagacggagtctcactctgttgcccaggctggagtacagtggtgtgatgtcggctcaatgcagcctccgcctcccgtgttcaaactgagattttcctagttcttggtagaatgagtgattttctgttgaaacttggatatattgtgttataagacttgggatcttatttaagcttgttttaactggcttcctctgacactggtccagcaagagaatgggggaggttataacgaggtggaggtggaagcacaggcacttcactgggtctctgttgacaccctgggggaggggactccttattactgcagggttggggggtggaagttcaagctccctacacggtctctattaatgctgtgtggggaaaaggacggagggctggttattgctcaatggagatagaattctcagcttccatctgagactgtgccttctctgataccccagaagctgagatgcctcattactgactggtgatggtagacatctgggctctccacttggcctttgctggcaagggtgctgggggagggagggatgacacggtttttctctgtggtgtttggctgaagtagaacgcttattacctaaaagttttatgtcttgctattctgatcctttgactagagagagcaggcttttgttgattattttgtttgtttgtttgtttgtttttaactatacccacttgtgtttttacgttgctgggttcttcaatgcaaattggatatttcaggtaaaaaacaaaccaaaacaaccccacagtgtattagtctgtagagctggcataacaataccacagagtggaggcttaaacaacagacatttatttctcacagttttggaggctggaagtccaagatgaaggtgtcacagggtaggcaactacaagccaccttctcactgtgtcctcacatggccttctctctgtgcacacatgcttggtatctcctcttcttatgaggacaccagttctattggattaagaccttatttaactttatctctgtaaaggccctccctccaaatagagtcacactgagagctgaagcttcaacgtatgacttttcaggggacacaattcagtccgtaatacccagagaatckgctgctatgatgttccttgggtcctgaggtccctggctggtctgccttcctctcgccatctttcagagtcttcttacttttgttttgaataaaatgtccaagtttttagcgggaggaatggggaaaagtatatgttcctggaatcggaagaccctctatccagagctctttaaaggtgcctgatgtaactcragtcaaagcagttctgttttgcaagagtgagaaatacttttgtttgaattctcatagtctctgaggactgacagcataaagatcaccccctaggccagagagtcgggaagaatatgagatgtgcgatggcagatttacctcccaaaagaaaaaagtactccttcatcaggggaggaaagatgctgagataggattgggaaaggttaagaaggtctaagcccctgagaaagatcccagttcatccatctcctggactgtgagaagggggatgggcatggcatagaaatctgacttgtgctaacttctcagggaatagatcagagcaagcaaaggcaagtgtcccaaagagggtggtatatgtccgggggtacttgtgcacagtagtgcacattaaagaacatctcctgagtcttgcagccctgcacagagagagataccaggtgctattttgtctgtgctcatcagagtctcagcctgtaagcttccaacctctaatgccagcctcagggctccccgaggcctcctggcctctggaatttccacactaccaaagctgtcagctccctccttgggcatgggtgtcagagcaggctcctcctattactcaatccccacctctcactattacrccgggctccttgaggaagattgattcgccactttaaaggagcctcgatgtgctcgatgaggatgccacaagacaaatggctcctgccgtgcgccttcagcccgttgtcccatgtttccattacatttgggccacagtcatggtggatgagcttgggtgtagtgctcattttctgccttacaygataaacttgtcagcatttgactgatcagctacttatatgcagggagttcatttgcaaggccacctggctccccgctctgttgtcctgctcccattttaccctgtctaatgagccaggacctggttcctgttgggcagcgctgggctcctgggccctgcagagcctgcacatgatggcaaggcctcagtgcctcctcacaatctgcctcccctgcctggaggtgacaagggcagtgatgcccagggagccattctttcctgctgccagccttgcattgcccagttaaaaaggagtgtgccaggcctccactctcctgcctcgagcctgcatcaaggcctgctctcagcctcctgactgagcaggcatgctgtgggctgcctcaggagctgcagtctgcccactccacamtggctttggggctgtttttaaggatcrcttagtgaaggcagctactaagccagggctctcagagttcaccctgaggtatggccaacaggaatgaggtgtacagcattcaagctgcctatggccccggcttggctggccttcaggcccatgcctttcccaagctgccaggtatcctagactctgctctgaccacactgagctcttccatgatccttcagcactccctgttgttgctggctgaagtcacatgactgagctgggcattcatagcccttgttgatgaacctgagcactggggttggatgcctgagatcaaacccagctccctccacttagtggatgattattatcatccgtgtttacaagagaaaccttgtaaatggcctaaggtcaagatatttggtttctctggtcctgacctgtaaatgaggcatgacaatgatacctatcttatatgcatcaatatgcatgtttagattgatatttggcacatagtaggtgctcaacaaaggttagctaatagcatcacatcattatgttcttccagccccacctaaatcctgcatgccctcacccataagctggaggtcaagccgatcactcacaagctctgcttacaagcctggggatctgttctccggccatccaaaccactgtcccaccctccatccaccaccctgcactactatacacctcctggcatgcctctcccttcttctttgctgatctgaacctgacccagacctggccaaggcctccccggggctctgaaggcactggctagcctgagcctgcagggaccagtagcacagcacatagtgcagggcgagcactatggccatctgcagggatgcctaaggaggggagaagggcagagcagggagccttgcaagggggaagaagccctaccttgtcccagcctcaccctacccccactcccccatcaattcatgaagctcaaagcctcaaaagtagttgggttttgcccttcataaggacatggcctttccccttcccattagccagctggacacctccaggccccctgtctgaactgggtccacagatcccagccctaccttgcccaggccaagggaagcacactaaagtccattacccagcatggactgtgcttgccttgttcaggaggcccaggmcccaccctcagtgagtgctgatatgggggaggggaccagaccaggggtccaggggctgcaagtgctgactgtccaaagcacggtggtctgggaatggcattggggtcatgtgctgtgcagcaggggctggtggtcagggattggggggcacctctgggctcaggtgctgtgtgaggctggcctgacaagagtgcaattccacatctgcactgagcaagctgtggaggccacgtgctcwgggtgttaggagtcctccagggcagggctggtaytgccagaggatgagggagctcagggagggctgtcatagacagaggaggagaagggccttgtcctgggcacagcctgcgtgatgatgaggagatgggatgtccacaggatcagggaggggcaggaggttgtctgtgaggtccacgcagggatctagggtgggaaggaggtggccatggagcccacggtgccatgtttagaaatttggattctcccttgtgggcggtagaagctgtttcaagttctaagagggtaatgtggtgactgcacctccttaaggagcttacaggaaggggagtttccccagggcctgggctggctctcatttatgcttagatcctcagggcatggccggatccttgatgctgatcagactgaggcagggaagcccaagaggccatgcagagagtgaggaggcatcctgccctcatagggacgaggaggggttctgaaagcacagggctcccaaagcctcatcctcaacaggagggaagagaggatgtcccaaggctaggctggcttcccagagtagaaggtctgctgtgggagacatctccttccccaggatttgcaaaaagtgagrgaaaggggatgcatggggactggagactcctttcaggcaagggcatctgtggacactccttgtgaacytggagaattcacctgggcagagcgaagaccagtgcagttagcatctgtgtacacagcaggcattgagaagacctaggggatggtcttaaagatttactaaccaccctgggaaggggagctgtccacatgcccaaggaaggcaaaacgcaggcgagagctcccaccattatatctgtgatccaggcagcaggatggaggaaggtgggaagcaggacaaagagcacatgctagttatctttgaggaggttccccggaagctgtggtgtagttttttgagatcttgctcatagaatttagacacctggttacccctagctgtaagggaggctgggaagtatagctctagtttgttatccatgyaccaagctaaaaaccaggggttctacaagcaaggaaagaaaggacatgtggtgtgcaactaggagtctctaccatgtaatgaacctttccctgcaaatgccatgcacccatcttcccacacacagagcactctcacccctgccctgggtgyctcatcctgtcccagcatccagcccccaaggtcaggctctcctggtgatacgcagccctcaccattgggtcttgaagtgactccttggaattttaaaccaaaatgttaaactttgggtggactttttaacttttggtgaactttaaaccaagaggcaggctgtgtacccccacacccagtacygagcagtggagagaacatcgtcagcacaatagactcctgtttggaagaaatgggaacacgcagcgggagcaggcctggcccccaacaggtcctgccgggtgggcttggtgaacctccctgtgccctgtggaggaagctgccagggagggcagcttctggtgctctctgggaggaacgcatgtgtccttggtgaaatcacgtgctctgtgcctgactcccgctcctgaagagccgtccttgtctgtactcttccagtgccaccagggagggggattcccttttgagacctgcttactctagaagaatgtctagaggagcctgggaattggtagaggctaacacaaaagccagctgtgggccaggcttggagctcctttggatccatgagtccaaaactgcccctacaagctcatccagatgtgggttcaaggcagcctggcccttctgcctgcagctctgcctctgaaccaacagcttgggggcagggaggtgaccaatacacttccttcaggttttaatgtgaaattgcctaattttgaaattgcaacaacaattttgaaattgcagtttagatgtctgaaagtcatagttcagcacaaacaagcatgcctacacacagatgtggctcacaggagccccagtggagggtgctgttgggtgggggattaagrgcccttccactgatgtgggctgacatgagggtctaagcatcccgcttcatcttggcatgcatgaccaatagcccacacatctggaggagagctggtcacagctggagagcagggctcctgcagggaccgtgcgaatgagctgggatcctggggtaggacagaggctcaggacactctggctgacttcactgcccacccacagtggggcaaggtggggggtcagggctggctcaagacctgggtyttgttgtgatcccagaagacagggctgccctgccctgtgtgrggctctgaggagggaagactggcctggagcgggacaggtgctagggctgtgcctgcctcccctgcagactccaccaaccgggactcgctggacatgattgagcgctgcatctgccttgtatgcctggacgcgccaggaggcgtggagctcagcgacacccacagggcactccagctccttcacggcggaggctacagcaagaacggggccaatcgctggtacgacaagtccctgcaggtaagccgtccaggtggccctgcaagagcacagccatgcccccagcgagagagtgagtaggcaagcgggcacagcctggtgcccaggcccgcacgtgcttgtgtctggcaggcgcactcactggtttctgctgcctaagaggctgggtctgaggggtcaggagagctggaggggtctgagatgtgctgttgatgtcaatctctggaccagccagaactcttctcaggagccagtggccgaacccaactcaaactccctaaccttcctgcagcctgtgccaggaaggtctgggccagacctggggcccatttcccatcacccatcacacctgtgaggtgggggtgtgccaggagtaggagagtataacagccccactgaacaaatccttaatgcatgctgaaataataatttctgatgcccagagctgtcagctttttggatgtccacccccgtggcctggcgatttcaacatacctccctcaatccctgagaagtagaacagcccagcatctccatggaagaaagactgtaagatgagataaaataattcatatatgttcatttacatgacatcagcctagaagcaagaaatttactttgacctagagaaaaatacccatgcagacgggatgaagtcaaggtcaaacsattcattcccattctgccatcctccttttattcccccaacatgccaatcctgaacctagtcttgtttattttaaagtcactacacttttatatgatatgccatgtagtataaaacagcaggcaaaaacaaaacatctctctactttgggttagcaaagctcacattgataagcatatctagacaacacctcgttttcctttctctctgtccctacattctgcaggttttcctttttattggtttgcatattgattctgttatttctgatgcgctctccagctgctgggccagctgttttagcctctacagtggtgctaatggcttatcatctttcatggagctgtgggggtgaaccgatataatacatgcacagaatctggaactcagccttggtagcagttttcaaaagacaccgctttccttccttccttccttccttccttccttccttccttccttccttccttttagtgacaggcacagataagtactaatgtggggggtgggtgcagccctctccaccacctctcatgggttagtctatgctgacctccaggttcttttcatcagcagggcagattatcaggcgaaccagagaagccagcagggcttcatggacctgaattcaagatgatggagaactggtctcaggatagcaaggcaggggacactgggggcgggaggggagggcctgcaaagggtgagtttggggagaagctctgtgggaagtgagtttctttgtagaatgkgagtaaagatccagcctctggcacacaaggcaagagattgggaggagaccccgatgtgagctatgacaggaaacagggctgaagggcctcacccaggccccaagggcagctgggcagactcgtcctgaggatgaactcctcagaaatccctggactgctcagtccgggaacttggggctccaccttcactgcccacagcttttacgggaaagaggtcgtgagtgcagagtagtcttggattctcatattctcaggccactgcaatcacatgcagtgttctcttcaggaaataatgtgctctggtgtccctggagaagaggtgccctgagaagccaggggcctaacctggggccaaggggctgccttgcaatgctgactctcccatgatcrcccactccctctttcctgttgcagtttgtggtgggccgagacggcacctgcggtgtggtgtgcgaacactccccattcgatggcatcgtcctggtgcagtgcactgagcatctgctcaagcacatgtgagtctggatcccagggctgccatgctgggcccaaaaaaatgtgggtggtcgctgggggctgtgtcagtctggaaagcgtcttaacaaaagatgaatttgaaaaaaatgtgtactatacacacacacacacacacacacacacacacgatgaatttgaaacccagctttgtatgcgacatcatgtgcttcacgggccatggataggaggcagcagatttacggcagtcagggagaagcatggcaaggaattctcaggaacctctgccttgagagaggggaagcctacatcgatacctattgcttatcctgagtcagggccaggcccacggctgccccagcacagggggagttctctgagtctcactgcttccaaatcccaaggctgggtccctccttagctccccagcagggttcctctgtgccctaaacacatggtattccttcctctattcccaattttacccattctctcctagaatcttctccctgcatccaagtcttcaatttcttccatgaaactcagggttactgaaacctaaaccaagcctagtaggcacaaaccttgtagaagagaacaacacagcttgctcttaaatttctctccaagtcttctgtaagggtgtaacatggtctaataggaaaacaatgaaaagaaataatgggttttggagtcaggcggaactggatggagccctggccctgccacttaatgattttggtggcctctctgagcctcagtttattcatctgcacggtggttcaggggcagctcgtaccccctgaaactccatggccgcaaacactgacagctaagatgattgcacagagcaaagaagagatgcctcccacagctstctggccgcagagcctcaggaggttgcctctgtgcccgcaggacgcagagcagcaggaagctgatccgagcagactccgtcagcgagctccccrccccccggrggctgcggtggaaatgctccccggaaattcaaggccacttagcctcctyggcagaaaaacttcaacggtaaggataaccgaagtctcctttgaggggtcccctagggaccaccccgcccttgcctactagctcccaaggctccctggaagtttccaaagaccccagctcctctgcctctccttgggctccacctcgtccccatccctcatgtagtcaaaytaaaggagagatayaactctggggaaataaccytgctgaagtatccatcatttcyctaaaatgcaaacgcagggctatttttttttttttttttttttttttcagtttcacctgactgagcagagtcaaggccgggaartcatcccctgctttagggggagtaataaacaactggtttgaataggtcatttgaattcaagctatttmmatttgcttgaatgtacagtgcaacttgacaaaggggcctttttccccaaggggagggggccgttcaggccctaacgggacccaggcaggagggcctggggcagcagcaagcagtggtggcagccacatcctggcaaccaygtctgcactgtagctgttgattctcccattcagtaagcaagcacgaatgcattcattcactggtttgctcattcattcatcaaacatgtgcagagctctggtgtgcacccggcccgtggtaaggctctgagaacacagaaagttaagtaccatgggaccygcactccatatttgagtggaataagtagactcccaggccaaaacgtgtgatacagtaagattaatgccaaaagcagaaacagccatgctgacctgaacccacaaaaatatagaagctgaactctgtcaggactgtgagggagggccttgtagagacgggccttgaaggatggataggagttcatggtgcaagcagatggggaagaggcagaaaggcagcttcttcaagcttgtacaagttcataatgatgaaggctggtttggagaccagcaagtgagagaatggccagagtggggccacaaaaaggaagttgggccacactgtgatgagtgtcactgtcctgttatgggcctagagcctgccctgccactggagggttctgtgcagggggtatggggacgcccctgaggaggctgtgggaagggcacatgtgagcaggacagagtgtggccaggctgggaagctgaagagcgggaaggacccatccactgggagctgctggagagggtgcctggcttcagtgggcatggaggggcctcaggtgttctataaagtggtgctcacatctcagctttgcagggttgttcaggagctaagtcaggggccaaggcagtgagctggtgggctgctgagtcctcagtgggtaaaggagtccactcacttccagggacctgagcagaccccacattccccaaggcccccagctccaccctccagaggctgaggagagccaggaaaggcccatggatggggaagmaggaggcttcttcctgggggtcctgaggggcccatacaagtgggtgaggcccgagtgggcacagcttgggggagagatttccaggtggctgtggtgatagtgagctcagtctgtcccagacgtctgtcaacaggtaggtctaaggagcgagtactcatgggaactgggtctcctccaagtccccctgtgttcctagcacctggccccaccgagagctgagctgctgtgagcaggaggaatacttcaaggagaggcaggcagggagcatggagtcccgacagaaggtgtgcgtgtgggctcggggttcccactcaggctatgcgctctccagtggggaggcacatagaccttgccagacactgctccagtgggcagtcagcycagaccccagactcctgatggaggaggagattgttcaatatgagggtcagccagtgctccagagtctcagtgcagacttggaaaatgttcctgttactccgacagtgaattacaaaatcccgggcatgtcacctgtgtcacagtkaatccctgactcactaacacagccaggcccacctccccacccactctccagagcagggccgacaccccactcagctgagctcaccttgggtcatagtagtcctggcctggtttgtcttctgacactttcataggtcaaggcatgtctctgacacctcagtgcactcctgaagggcagggactacgtccgcaccttccagaacgctaggacacagaccaggctctagaagcccggggaaaccccagatgcatgcatactgttttgcatgcaataaaaacatcttttctttttcttcctcagaataktaaagaaccttgacttcattgtctataagtttgacaactatgggaaaacattcattaagaagcagaaatgcagccctgatgccttcatccaggtggccctccagctggccttctacaggtgagtgaaggtggagtgagtctgtaccctggagggctgacggacacagtgctgtaggatctagggtctagaagcatcctggagggagggacagccttctgtgggcctggaagactggagagggactgaggctgcatgaaggaggagcagactgaactgggttacaaatccaacctsagaacragaaggatgtgccatcagggaactgcctgggtgatggcacaggggcacggagctccaaaggactggagtgtagagctgagaagagccaggaggggatgaggaccatggttggggttggggggctgctctccatcccaacttcccccayctcacccaagccctattgctgcaacctgttcctccccagtcttcccaatcttgctaaggaaatggaaccagcagctcccccagctgatcaagacaaagattttggactcatccttgattctgccctttctcgtatccccgcacactgccatatccgttctcctccaaatgtctctcacctgccctccacctccactgccattggcccctcccaggccaccatcagctcatgcttagccaacggcagcacttccctagggtcactgcttccagtgttgcccctggtaatcctgtcttcatgaagagtgaactttgaaatatgcaaatcagactagattactttccacatgaaacttcccagygccttcacaccaggcttagaacaaaagacaggcttagaagtgccccctgtggactggccccacctgaggccctcccacacccccagctctctcctgcctcctgacctttgccctggctgtgcctctgccacccacggaaggtgtgcgtgtgggctcagggtcaccaccctccacacgcaccagccctttccagcccagtttccatccctcgaagcctttccccacccccttatctaaagcagccccctgtggcccccttgccacccattctctgtcataccacattgaattttctttttctttcaggcagttgttacttctgtgaattatcttgtttgcaggtttgctggctttgttttctagactatccccgygaccctgacattctgggcatctcgcatgcctctgagtccctagcacccacaccatacctggcacagagtaggtgccagagactgaatcacagacgggaggtttagccagaagtggtccggccaggtctgggatttagacctggtggcccaggtagctgtgtgtcggggaaggggtgaatagtagggaaatcaggagtgaaggcaggggagaggtcaattagccttacaggaggcgaagaaaccaaaatgtgaaatagatcttcctggagatggggccagctcctgacagttccagggctgcagaagcagcggctcatcaactgcctgctatgaacggtaaagctctgccctccaacctgctttcagtttgcaacttccatgaagggcataaagttaccctgcagtaaagctagggcaaggcattctcactaatgaacaggcagcacccgtgtagacacagcagcccagtgtcccctgcggggctgtaattctcaaggaagtgagtgcagccactttgagtgtctgtcctgtccggacaccttggggaaggccgatgtcatcccacatgaggactgggcttgctgctgagacttgaagaggcagaaacctcaccagtactgagatgctgcaggacctgcctggcatttggaatggtggtcagtgccttctgatactcagagggcatggggccgagataggccgtgaggtcagcatcctgccagagcctcgactggggatgccactaagaccagctgctcgggacctctctactatgagcacttccaagtttcagatccagagctgagggggacagtgcagcctgcacaatgcacccctcctcctcctgcctgtgggctgtgctgtcactggacaaggccaggaaaggacatagccagaggctcctgggttcatcgaatggccaaagaggatctgcttcccatgagcagcattcttcaggctctaagctgtaataatcacaattgtttttatctgcccccagattcagcagaaacctagaggctgcctgaattcgggttggtcaatgactggccagtgatggtgtttgcctccagggaccatagagacaggacaggagctccttgccagagtcttggggaaatatgtcagagtgtacaggaaggtcattcccttgctcaccaagcaagacagtgtcacacaccctgcagacttggacatggccttcccaaacctccagsagcccagccagtgagggagagacatcctgagagggctgagatgtggggccacgacttgctgggtgacaytgggctgtcactgcttctctccaagctctgtgtcttttttcctcccccactcccaacatcaaggactttaccaagtggtgagaaagggagtgtgcccaccaggggtgcaagcccagggacgctggcccagttaccatgcataaggacagaggagtcccctggctggtggggaagcagccactgctgctcaggacacagtcatcagggaagagaggcacagccatggtgcccatgggtctgtcagaagcccagctgcccctggaagggagggcctggacagccgtttacgcttaccaccactaaggctcctccctgcctccctctggaggtcatgcttgaatcagtttaaataaaacaggattcccgcataggtgggaatgattaattacacaattattccattctgtgctgttcatcaaacactcaggtctcacagaaaactctaggtttcccaccaggttgggaattttttttgaagcgctacccgtcacttctttattttatgtcagtgcagcatccccgggtgtatataagcaaacgtggctctccatgtgggagactccccagcgtcatctttgggaattccctctagaattctattaatattaaaatgaaatattctgccaagtcaagtcagggctgtgaaaataaagcttgctgaggcaatttttctttccgmgtttatgatttcccaagaataaattaccatgtgccattcatccttcatcccacgcaggctccaycgaagactggtgcccacctacgagagcgcgtcyatccrccgattccaggagggacgcgtggacaacatcagatcggccactccagaggcactggcttttgtgagagccgtgactgaccacaaggctgctgtgccagtaagtcccgccccaccccacggccacaggaaaccagtgaggctgctgtggttgccctgggttgcagtgggctcggccctctgaccaccagatgctttggctccaagcagccttttaaaccccgcgctgcctctgtgttctgttgacaggcttctgagaagcttctgctcctgaaggatgccatccgtgcccagactgcatacacagtcatggtgagtgacgtcgcaccacctcacaacactgcacttgagctgtgcctggggcctgccagaatgggcaccayggcataagaccctgtgtgagggcccagccacctgttactcggggacttggcaaggccrcttcaccactcggtctcttgtttcttcgttttagaacctaagtaacatagcattcctgtttttgacatggattttataagaatacaaaagttaccacttttcaaaccctttgaaacaaccatactgacaataatagcacctaatatgtatagcatcttgcagtttatacaagaggagtcaactgtgaggggaaggggctcaagcctggcaagcgatgggggtcacacaccttccccaatctcaggcaaaacagtatctgttcccacctagggctgcttttgcctctcattctctgtatattcatttatactacctgtgaataaaaagtctttgctgaaaattaatagggaaatcaaacttgcaagggaaatgtttctctagcttagagaaataattcattttctggcactgcaaagctawtgtttgcaatagcaaaatagagaataagcagtgacttgggcggctcatcaatacctgcattgcaagtcattctaatacagtctttgaaggatcatataatctatgagaaggagctgaacaaatttcactatagatacttgaaaacagaaacaatgcatttctggattttagaactagccaacatagacttctctctaattcagttgctaggtccctaattcatctaaatacttcagtgtttgttctatttggggaaaacatagcacccactcatgtattcagtgggtttttttttttttttttttttttttggtcttcatgctttatgccaggcaaggtgctgggtgctaggaaacaaaatatgaagtccataagccctgtccttagggaggttaccatgtagttgggagaagaggcccttcaacgtgaacaccaatcccatgtgaaaagagccctcagaaagtagcaggggacatggaggagccagctgtttcctctgcttgggaaagccaggaagaattcccagggaaagtggtgcttcctgtgagccacaaaggatgaagagaggcttgtcaggcagacacagaagggaaagatggctcaagaagggcaccacgtgcaaagactgagagccttaagagaataaracccattcgaggaaaagcagagcacagcttgcaaaggacagtggggcaggggagatgttggatttccctgttacaaagtgtgttatggtgactgggtggaagaaggactggttggaattgggggtgggaatgtttgctgagaggcagagttgctggttaagaacctttctaatatggaggaagagctggtgtttggactggagtaggacargggcagggtgaaggggaagtcgtaaactcctcctcttggtggaagaaactcttcgcgcatggtggactgcacacagggttactgtcactctctctgaaaccctccaaaaacaacagcaagggatttttgaaagccgtaaatacaccagggcaaagagaacaggaaaggagtggcagcaacatgttagagctggaaagtagaacacatggcgactgactcagcaaacagtgagagaagcttgggagactgggtaatttatgaagaacagataattattttttaaagttctggaggtcggacgtccaagatcaaggtgccagaaggttcrgtgtctggcaaagcctgctctgtgcttccaagatggtgccatgttgctgcattctcctgaggggacaagtgctgtgtcctcacatagtggaaggtggaaaggccgagggctgaacactgtgtacagcctcttgtataagagccttaaacccgtttatgacctaatcacctcctgaaggtcccaccttctaatactatcataccattaagtttcaacacatgaagtttggacaggacccaaacatccaaaccatagcagttgatgatctatataaaaagcagttagaccctcagttcctctctaccaccccaggcagccaggctactagcccccctccccagtggtgggctagaagttcattctctggagaggctgaagcagaaggactccagacttgaggacactaggcatggctgagggagggaatactgtacggaaattaattggttaattaaagtcttactactttcttcttacttactattaagcccttcagccactcagctccatacacactgggaactagctctgtaaccatccctcaccaagcaggagattagaagatttctctgtggtaaaattgaccaagccaagagagaacactcacagaaactgatggttggggcccacagtgaaagagcctagtcagcagatgaggtagtggtttgccaagaggcagagctgctagttaagaaccattttaatattgaagaagagctactgtaaggacagtgaagcccccaggttaacaaatacattatcatacataaatcttctaatcatattttcagtgctttattcttaaatacaaatagccatagatcctccgacattgaggagacataaaagagtaaaaccaacaccaacaaacatttttgctaattaaaaaaatctttttaaaaaaacttaaaatggaccaggcacagtggcttatgcctgtaatcccagcaatttgggaggccaaggcaggcagatcacctgaggtcaggagatcgagaccagcctggccaacatggtgaaaccctgtctctactaaaaatacaaaaaaggccaggtgtggtggctcacacctgtaatcccagcactttgggaggctgaggcaggcggatcacctgaggttgggagttcaagtccagcctgaccaacatggagaaaccacttttctactaaaaatacaaaaaattagccaggcgtggttgcgcatgcctgcaatcccagctactcgggaaggctgaggcaggagaatagcttgaacccgggaggtggaggttgcagtgagccaagatcacgtcattgtacttcagtctgggcaacaagagtgaaactccatctcaaaaaacaaaacaaaccaaaacaccaccaccamcaacaaaattatccaagtgtggtggcacatgcctgtaatcccagctactagggaggctgaggcaggagaatcgcttgaacccgggagtcggaagttgcggtgagctgagattgcaccactgcactccagcctgggcgacacagcaagactccttctcaaaaaacaaacaaacaaacaaaaacttgaaatgaaaaaagtacaagaaacaattgaacagtttaaaagtgatcattgagattctttgaaaaataaaaggagttattacatctatatatgataggaaactaaaaacatttttcaggaaataaaaataactctgggggaaaatatggtagaaaaaaattcagtggaagaattagaagataatctgagataatatccccaaaatatcaacacaataaagagatgaaatataagagagaaaagaggcttagtccaggagaataatattccaaataacttgcttaatagatggaaaatactcatagcaaaggaaatttcacaacactaaacatgaagagaagattctaaaatctatcagaggataaaaaaatcaaatacaaagatccataaaaaagatgtaattaatttctgaacagcatcattggaaggtggaagataaaaagagtagtgtcttcaaattctgagagaaagtgaccttcaacacacatttcatacccagctaaactgtcatcaagtttgaagatgcatcaaagatatttttagacagagaaagtctcaaacattttacttattaagcaccatttctcataaagctactggagaatgtagacttctaaagtgagaaaataaaacataaaagaggaaatcataggctgaaaaaaaacagaagatttaacacaagaaaaagatagaggggtgcccgcaggatgacagtaaaaggagatcacaaatcaacagttgttgagtacacctagagagcaatcagtccataaagaagcaagaagtgagaggacaaatgaaattcttgctgcatgtttaggaatcagttagaaacagatacatggggcctggcacagtggctcatgcctgtaatcctagcaccttgggaggccgaggtgggtggatcacctgaggtcaggaattcaagaccagcctggccaacatggcaaaaccccatctctactaaaaatacaaaaaatagccaggtgtggtggcacatacctgtaatcccagctactaaggaggctgaggcaggagaatcacwtgaacccagggggtggaagttgcagtcagccgagatcacgccacttcactccagcctgggtgaaagagcaaaactccatctcaaaagtaaataaataaataaataaaatagatacatggaaagctaaggaagtaaaaaagtaatttatacattgtcaattctagggaaaacaaaaaattcaataagaaaggaaatctaatcatagtacactacatgacccagctgtgaatacttgcttaattatacttatgtatatcgttctgtatacatgattatgctgtatcttgatcaaactacaaagagttaaaacataatcttattgggaagatgggagagtagaagtgtgctgggggagcagggtcataaaagagctgaaattggccgggtgcagtggctcacgcctgtaatcccagcactttgggaggctgaggcaggtggatcacaaggtcaggagatcgagaccatcctggctgacacggtgaaaccccatctctattaaaaatacaaaacaattagccaggtgtggtggcggggtgcccgtagtcccagctactcagaaagctgaggcaggagaatggcatgaacccaggaggcagaggttgcagtgagctgagatcgcgccactgcactccagcctagacgacagagtgagactccatctcagaaaaaaaaaaaaagagctgaaatttcactgtctataacaagaagattataggtaaaactgagaaattcagtagtggtaacctaagcatatgtttggaggaaagaaagtatatacccaaaagaaatagctaaaagactgtaaggaattacctttgtggggtaggaatccgtgctggcaaaatgacctaggcttttggtttatttggatttctaaacgatataaatatatgacaataacaactttaaatttattaaaatgtctaggaaaacaccctccaaagcattgccatagggttgtgttaataattttaagttgatgagaacaaccaaatcaaagagatgggtttggggaaaggagagatacaaagatgcttaggatgtgaatctggtgtgtggttggacatggagggtaaggaaaggggraaagaagcaaggaaacctaataactggtaagcatatttgccagtggtcgtggagaaataaagttccaatggcaaggtggtccagagcccccatcacttactctcccacttctatgttttcccttcctcacacttgagtttatgatcatgtttttttgcatggttgatgaaatctgtcccccactacaccataagctccacaaggactgagtctacaactgtcttgttctctgttgtggctacaggacccgcggcaccaggcatatagtaggcactcaattaagattccctaaatgaatgaatgaaagactgaattataagtcattttactcgttattactcatggctctgagccaaacaacctgtgaactcagtctctcttgctacagttattccaaggtggtgaaaagaggggtgagttgactgttcacagggaagctgcttctatggaccaacacaaatcaggaattaaatagaggaaaccagagaaattaaaagagtagtctccttcatagatgggctcaccgttctttccttcggtcctaacaggtagggcacgtctaaagtgagctgtggttgtgtaatgtttgtcttttcagcctctaattaggtgcgttcagagagaccagagcctgagtcatctttatgcattcattcgcaactgaaagagaacagctgtcaaatccctaaacgtgccttgtaaacctataccaagttcattgtgaatgggaagtttcctcctgtgcagggctttgacagctaactggccatcctacagaactgtgaaaccccaagagttactcacagttaccctgatgttgacccaaaagtgattactatgggtcagggtggccccctgagtctccatcagcccctagaattgctccaaataaacatgcagtccaaaaaaccagtgtgcatactacatacccagcctcaagtgggggagctgtagaatgagtacccggccccacttccagacacctcaccctccgtgaacccctcctacattgacatcctggagctttctctatatttctatcctttgataaaagtttaaatatcttgtgataaaaagaaaaagaacttttattattcaacaggctctttccccttgaaaatgtcagttgagcctgctaaggggtctagttcctgtctcaraacgatttcttagattatggatccagtttaaatgaattgatcctgagccatgaaatagcagccaagattcagtaacagatctcacaccctctatcctctatctcttgttccctgggctcctactggaggagacagcgctggttgtggtgggagtctgttcaggacagcctgggacgcccttcacaatgcttgcacaggatccggtagtctccaagctctgcacacagccttcttcccaaactctctccctgcccaagcagttggtagttgagaagaccaggccagccccattctttccacttagagaaccaggcggatatagttgtgtaggggatgctcagactcactaacctttagctcagatgtctcaagctagaacccaacctgctctggactcattcagtgcatgtggaaatgcgcaagggcccrggagcagaggccgcatggtagagcggtcagtcctgagcagccactcatacacattgttggcagcaggcactgggtaagcatgagccgtggctgctggagtcaccagcagtcctgtagactacagagcagggaacaaggaggtgcaggaggcccacttctcatctcctgttctttgtccccaactacacaggccataacagggatggccattgacaaccacctgctggcactgcgggagctggcccgggccatgtgcaaggagctgcccgagatgttcatggatgaaacctacctgatgagcaaccggtttgtcctctccactagccaggtacggccccgtgcagctatcgcccaagagtagtgtagtcagtaagctttctaaagagcagtgacaacaagcccmctagctggaatcaggcaaatcctgcctctgctttttctgaactatgtgatcttcagcaaaatgatctgaatgttcattagaagatggtttactgaccaggcttggtggcttacaactataatcccaacaccttgggaggctgaggcaggaggattgctccagcccaggagtttgagaccagcctgggcaacatggggagacctcatctccctatttttaaaaattagctgggcatggtggtgcgtgcctgaagtcccagctactaaagaggctgaaataagaggaytgcttgagctggggaggtggagattgcagtgagccctgattgcaccactgcattccagcccaggtgacagagtgagaccctgtctcaaaaaaagaaaaaaggaagaagaaggtttcccatctcctaaatgggagtaatcagcagaccctacttagccgaggtggagacagtacaggaacatacccattctggtgccctaaccattacaccttactacctttcaatctattgccgcggtttccacgggctctgatgcccagcaggtctgcagtgaagwcttggcttggccagatacaattatgtagggagaaagcccagcccagggcctggcatggacagggccctctaaataggtcrcagatattattataaagggccacgcaaccaacagcagaacattcgtggccagcccaacatctaaccagtgcctcagcgtgtcctgtatgagagccactgccacaaagacagaatgcaatccattagagagaggtcgtggtttaggaggggaaatgccccacagccatcartttactaaaatgccacctcatctgcgaaaggctggatgggcagtactggagttgataagctgtgtttgaggacagaagcccactcagtaatgggatgttgtcattatggcagtgagcatgcagacgtgaataaacgaggacagaacacagcaccataaatttctcaggaaatcatccatgggcaaaaagtgctttggaatggctttatggccttcggctattgcacggcaaatttatctgacaatgtggtgactctattagcaagactaatggtttgttctgccccattaaaacagccagtgtcacttccaaaggcctcagcacacagcaccagaaacctgtaggtttaaaacaaaccaggccctgcacctgcccaagaatcctttctattttttttcccaaggaccagctaataaaattaatctggggtgtgggagttttgttgttttccaactggaaagcagcatttatggcttgaatgctttcagaaacatactttcttggtttgtgatctggattacaaaatctcagcactctgattcaaaacatactaggtgcataagtaaaactgatggcaatctttgaaacacccaactctgggtaattgtgcatggccaggctgcagggagaaatcagagaagccaggcaatactgacagtaattaaggatctgggggaaatcgacasagaggatgggccagatttcctccagttcataaattcctccctccggaaagcatctaactatggggtgccaccaggggaccatttagtaaattacctgattgcctccgtgcctcaaatggcccccaggtgaagtggagactcagcccaagacctagcaccaggtcactccgggagcttccaactccacaagtagagcagattgcacaccagggagtgggcttggggcccctcatcctctgatatcatgcagttagatgggtctgtttttatgactctggctgtgtccatccatgctaaagcaatcacttgatttggttaattcagtcaaacccccaggtggaaaacagagaagccaagcccagtcgaggctggcgggctgcattccagaacaagcagctcctgacctgtcctctcctccaggtgcccacaaccacggagatgttctgctgctatggtcctgtggtcccaaatgggtatggtgcctgctacaacccccagccagagaccatycttttctgcatctctagctttcacagctgcaaagagacttcttctagcaagtttgcaaaagctgtggaagaaagcctcattgacatgagagacctctgcagtctgctgccgcctactgagagcaagccattggcaacaaaggaaaaagccacgaggcccagccagggacaccaaccttgactcctgccactaggtttcacctcccaaacccagcctctagaacagccagaccctgcagatccccactcccgtcccttaccccagctttccacagctccctgtcctcagggtccaactcacagaccatacagagacatcacacagagccggagtgttaggaggaaagggtcccctcttcatgcatgggaatcatcattttcaaggtggctttgggcctgcacactgggaaatgggacctgcctggctcagaggcagcctggatgcactggggaaccacactaaggactccttctgtggtccttggaagcttagtgttcatgtctccttccctagcaggacctagtatgtccaggtgatgcttctgcccaaggaaaggatgagtcactctattacatgcaacgtacctaatgagttaggaaggaagaggctaactccaggtcattacctcttttcttttttgggggagaggaggctgtgttttgagattcagagcattcttatcgtggcattcccagtgtctccactgagccgtacagtcctacaagcacccactcctcccacacacaccacagagcccaagtccatttaaaatatagtgacttgggcccacaaacacatttctgctttcgtgcccaggggcagccttctgttgagctcagaaaattgtgtccagctattctgaaaggaaaaaaaaatttatctgtgactgccctggagttgctgccactctctgcttagcaggcggcatcagggccagtccaagatgagtaaactgcacagccccaagcagatggtgcctggtgccggtgggtttgcagaggacctggccccttcccggggtcctgccatttgcattttttctgcatcttttcccctctcctcccctcctacatgctccagtaggtgaagagagatggttactttgggtttttccattatctgttttgttttaagacagagatttttaagaaaaccaccctgacattaatttcagaaattcttagtgattcaagcaggacccttaggcagctgggctcctttatttggagcaggctatccagggactctgacaaaaacccatgtggtagagcctagagcagggctctcttctggcctcagggacttaggggacagctggcagggagcagggctgggaggagggcacagcctcctccagagtcagccccagccccagccccagctccagctccagccccagctccagctccagccccagctccagctccagcatgggcaggacaggcaggtcagcagaggcagagttgagatgtctccagagactgtgatcataggagagacacaagaggcacttcctattagagcacatttttatgggaagtctaaagggcagagggagggagtaagaaagcaaccagagaaatctacagcatagagcccgtgtgttctgctccacatccctccaatcctgctgcttcctgctgagcactctgctctagcccagcaatcctgtaggtctcccttctttgtgccactgtgaaggctctccacacttcgacctggactgtcacaggctggcagaggtggggtgggcatttgacctttgctcagctctttgaaaacacaagcagcctcaagaagtgagttccttgaacccctggttttagatggaggatctctattagatgtcatgggagatttgggcactaccctttgaacatacaaacttaagtcattggcctgagatttatgctccttccctcccacggccaccttcctactctgcttaggaagttgcagcacaagggtcctgggttttctggggaaaggcagcccacctgctgtaagttggcccaaagctacttgtctgttctctccaagtgaccacagtgcagatctgagttctcctccggttcctttccctccatggatttctgcgcagacatagagctccagctatggggccaggcagccccaccaacctcggccaaatgacatgcatgcccagagacgcagttccttccactgtcaaatgagaacaagagtgtccccacttgcaagactatgaggattggagagcatgtgtgtcaaggaccttgctgggtcaacaattcatttgcctttgtctggagtctgccagcagcagtagctaatgtctaaaagacacaggggccaggagagaaaagggaggaaagaactaagtctctcctagtctatggcatgctatcatggggtcaagtaggggcagggaggcttcatggggcctacctttgggatgacattaccccagtgggcattgtttgggtggttttcttttaaactatttacactgatatgacagactcaaactcatatttgctattctccgagcacatggaaaggtaactcactctgtacattcagatatcaaactatgcactgtgagggctaygagaagcgcaaacagtaaacgcttggcaggagggaacacttcctctctctgaggaagaggctggaagctggtcttccccctccaagaatacacgggtgcactgagtctttatgcaaaggcaacactgagccatggccaagggcatctctgcggggaccctgggaaaggagcctgctccaggtgtccccaaagagatggaaaacaagacagtcatttggaacagtgatgcataataaaatgtatgtggccaccttacaatactgctaagttgctaaaatatataaagttaatatttgagttctatttttataaaatagttctagatttatggcaatataaacgtgtatagccttttgattttaatttctagttttgtgctttgaagaaatatatgtaagattaaagaactgtatattgtaagcattatattcaaattatttaaaaattgttctaagtctatattcaataaaaagtaatgccaagaaagatgatgttgcccattgtttctacccagactcgctttaaaatgtaatgtcataaattctctgagctgggtcaacaattcatttgcctttgtctggggtctgccaccagcagtagccaatatctaaaagacacaggagccaggagagaaaagggaggagagaactaagtctctcctagtctatggcatgccatcacggggtggggtaaggggcagggaggcttcatgggatgcttgtgatcaggttgacagaaacctgggtgtagacaggaagtgggtgtctccacttaagcctgcacaaacatgtgtggacagcatggggaagagaaaagagcacaaggctcagaggctggatgcctggacaataaacacagctctgtttctaacttactgtggactttggggaagtcacttcgcctctctaggcttagtttcctcatctgtacaatgggaatattgatatcagcattactcacttccagggttgtagagagatgatatgagttggtgactgtttgaaaacttaggaagtggtgtaaaagccaagccttcttgttgcaggctcacacagacatacgcacacagcttgttttgccctgcacagctgaaatacattccaagctgcaagatatcctcatagccatgaaaatccacaaaatcagaactgagattcctccaaacggaagcccaaatgccttccaattggaccctaaaaaagaaccttgaagtgtgtgggtttgtgggatttgggatgctggaaaggcactattcaaagagataatggctaagagtagtccagcaggagtggaggggaaagggaagaacaggatctgagcaatatgggttttgctcttatcacagatgtcacagccatccccaaagtaaccagatgcagagacagacaccgagagaaaggcaagagcaggcaagccgacatgcaacatacaaaaccacgccaccctcctgaggcctctgaagctccctgcggggtgggtgttggtacagaagcagggaagagtccctcccaggttcacaagagcagctagaagtttccaaattactcctaagcagttctccttggagagtaatgagagagagagagagagagagcgtgagagagcgagctaggtggagggagggagattgagagagacagtgtgcagtgccttgggttccctttataaattcagcctatctccctgcttttgtgcttctgagttttcatttcaaagaagcctcttgagtctgcaaggtgaacaatatgccacatctgggaaaagctggccacacatcccccgaaaggacctttctaaaagctgttctccatggctcccagggaccagctctgtccttgttcttctgctgtgtgctcctcccacctccttctgggatttctctccctatttctgctgtgtatatgccaatggatcccttagtctctgtttcttacattaaggtgcagcaatatgggctgaggtgatgcagaagcgcccctccacctgcaaaaccatatacaaaaaaaaggaaaagttttaaaatatataatcaagagaaagaaagcaagtcctcacattccagaaaaaaagaaagatgtccagagcatagcactaagcaggagcccaaggtgaagcagaacagagcctcagtggctccagctgggttcaccgtccctgcaagcagagaagacataacaactcatgcaaggcaggagaagcaactaaactccctgcacaaaccaggacctcccagaggcatgccgaccatgtgacaagaactagaaaaacctttctcatcatctcatcagtgcaggagaggagaaaaaaagcctgccatccacagggctgtagaggggggaaaagacatccatgaaaaagtaaaaccataaactcatgccatatgtggatgaggagcttgaattcataccgcttatatgtaaagcacgcactccaagccgataatattttttattcttgccaaacatatttatttatttttatttcaatagcctttggggtacatgtggtttcagattatatggatgaactgtatagcggtgcagtctgaaattttagtgcacctgtcacctgagtagtgtacgttgcacccaatacataatttttttaatccctcaccacccccccacactcccccttctgagtctccatagtccatatcactctgtgtgcctttaaatacccatagcttagcttccacttataagtgagaacatatatatttttttttgttcctgagttacttcattaataatggcctccagctctgtccaagttgtgcaaaagacatttccttctttttttatggctgagtattattctatggtatacatattacattttcttcactcattggttcatggccacctagattggttccatatctttgcaattgtgaattgtgctgtaataaatatacttatgcaggtgtctttttgatataatgacttctttaccttttgacagatgcccagtagtgggattgctggatcaaactgtagatctacttttcgttctttaagaaatctccatgttgctgtccacaaaggttgtactaatttacattcccactaacagtgtataattgttcccttttcaccacatccatgccaacatctattgttttctgaacttttagtaatggccattcttgcaggaataaggtggtatctcattgtggttttaatttgcatttccctgatgattagtgatgttgagcattttttcatgtttgttggccatttgtatatcttctattgataaatgtctattcgtatcatttctcactttttgatggaattatttgttttttttcttggtaatttgtttgagttccttgtataatagattctggatattagtcctttgctgaatgcatagtttgcaaatattttctcccattttgtgggttgtctgtttactctgtttacttacttttgctgtacagaagctttttagttgaattaagtctcatttatttatttttgttttagttgcatttgcttttggagtcttagtcatgaattctttgcctaggccaatgtccacaagagtttttcctaggttatgttctaaaatttttatggtttcaggtcttaagatttaagtctttgatccatattgagttgatttttgtataagatgagaga

SEQ ID NO: 94438 - DNA, 16299 bp, Homo sapiens
gggagactcagtctcaaaaaataattctaaaccccaggcagattcccacttcacctcatcctgatgagaataaaaccaatcaaatgtaatggggttggagtagagataacgttacttgcaaagaaatcaattaaatagccagctaacttttcattagcaacaatagacgctagataccagcagaatgtgtttttcagaatcctgagcaaaatcatcgacccaaaatcccatactagctaaaatataattcaaaactaaggatgaattaaaaattgatttagataaagaagactgagctaactaaccactcacagacccttgctgaaataactactgcagaatatatttgaatgagaagagaattgaaccaagaaagaaggtgtaggttgcaggaaaaaaaaaatagtgagtgaagaattttgtaaacataatgggaaatctaaataagtactgtttgtaaaataacaacagtgacattaatagtaactattttttgtgggtatttgttaaaaaaatacagaacttaactactataacagcatggagcaagagggaactgtaagtaataacttccacagtctctattattttatagaatgataaaaaaagattttctttagattttggttggtttacaaatttagaaataatctctacagaaataaaatgtttgactccaaacctgtagaggagaataaattcaataatcaattcaatagagatcaggaaagaaacaaatacaaaaaaagtgtgatcaacagaaaacaataacaacaaataagacaactgaaatgagtccaaatatatatttaatcacattaaaagtaaatgaactaaattcttcagcttaaaaagaaagacctccagattgcataaaacccgtaatccaggtatatgctgtctacaagcatcagacctaaaaatagtaactcaaaaagtttgaaagtaattagatggaaatagctacattggaaaaatactaattaaaatagagctaaaatggcaatattcatattagacaaaataaaatattaagtcaagatcttagaaagactgtcatcaccattgattatttgggctaaagtttaatgacatagatttatttttatctgtgcatttgtgttgtaatgtgccatattaaccaaactaatgcaaccatttatttttcttttttttttttctttttttttttgagacggagtctcactgtcgcccaggttggagtgcagtggcgcgatctcggctcactgcaggctccgcctcccgggttcacgccattctcctgcctcagccttttgagtagctgggactacaggtgcctgccacctcgcccggctaattttttgtatttttagtagagatggggtttcaccgtgttagccaggatggtttcgatctcctgacctcgtgatccgcccacctcggcctcccaaagtgctgggattacaggcgtgagccaccgcgcccagccgcaaccatttcttaagagtgttcttactgcattttcaaagtgtcgataactcttacaaaggggatagcatttaacagattactgcttcagtgtcatcagtggtggcactgtgatgtaaattaatagttctgcactcatgggtgttcattaatacttacagaatagttggcaatgcttgctgacagactgctctcaagtctgcctttctaatttctgggaaatagtttgtctaccatgagactctaagtccaaatcaagtatacttttgaagcaatttctaatcacagtgaaaattccccaagcagcatattttattttaaacttgttttatgtagcagcaacatatttacctgtgcctttgaaaaatatagtatcggggagtctttgaaagattattatcaaatgtaggctggacggggtggctcatgcctgtaatcccagcactttgtggaggctgaggtgagcccaagagttcaagagctgcctgggcaacacaggaagaccctgtctctacaaaataatagtaataataacaataaaaaaaattagccgcacatgtgcctgtagtcccagctacttggcaggctgaggtggaaggatggcttgagcctaggaggtcgaggttgtagtgagctatgatcacaccactgcattccagcctgggctacaggatgagactctgtctcaaaataaaaagattgttatcaaatttagaaatgagatggtgtgaagagaaaagccgttccccgttcctttcaacactttttctagtaacaaagttacatagaaatcttaatcccttaacactccattaaggtttcagatatttcttccttctcccttaactagccctggctagaggaaacaatactgtcttactaatcagggcaaatcaagctctttgtcaatagcagagcccaaatagatactgtggaatgagtttcccctctgtccaggagggaagccaagttgtgtgaccctatagcagtgacaggaggggggtyacagggagtgggtggaaaattgttcttgctcatgcatagaagcagatcagcctttgggtactagttcctctcagctgggtgccttgcccagatgagggtgagcttggtagcctgagaaactgggtatttttcccaggcttctgggtgactgctgccatctttcaatgccatttgaaaagcacctcgaggaaactcctcagtggcatctgaagagcccactggctccaaggggaagaatctgggcaggaacaaaggaagaattttctcccctctgtatgttgcaaggacaatgcaaagtagggttttatgcattcattttatacacagagccaaatggtagcagtttaaaacatgttttgttctgttttgatttggagctccaagtaaattgatttctttactatgtattaccacagaacaaatttaatcacatagataattttctaatatgtaatagtttagaacagggctatgacctcggcaatacgttactcctgaaatgccgtgagtaatagaaccaacttaatttgaaggactacttgtctgaattttcttaaaaactcatcttcttctcatagcaagagacatgcaattctagaatgtaagactggagagatacatagagatcatttagtcaaaccttcttaattctaaggaataatatctggcccaaaagaaaggaggtaacttgtccaagcctatcccttaaaggtgcctgtgtcttgggctcaagcccaagtccttgccatctggggccctttttgggataacatgctgctgaaaagttttttttttttagccattatgttctaatgctttttattatttttctgatgacaaaagtaatgaatgctcattttagaaactcacctattgtcttgtcacccaccgttgaaatgttggtgtatttccttctaggcagttttctgtgctcatcattgtacagaaacaggatgaggctttatataattttgtggacatcttttttcactaaatgtatcatgaacattattccatgtcattgaatattattctttaaaattatttttaataggtgcatggcaatctgtgctaaagatgtgccgtaatacctaataagtctcattgatgaccatttgggaagacaccagatttttaacgctaagatgttgtcttgaacatagctgacaataaatttatgcttatttttgcatgctgtatgacatgcccccttagtatagacatcatagtcattttataatttaggaaattcttagaagaccagagaatatttaaaaccctcaattatttcatttcactagattagttggcttatagttaatgcaaataaaatcagatcacttttaaagaacaaatctgttaagctttgacttggtcaacgatggattaatcattaagttaattagccacatctctattttattagccagctgcaagaagagttagaataatctgccttaacttggcagataagtcctctgccttcacaatgttttttataatgctaataaagcaagtaatactaacagtactaagagtagcagctactgtttattgagagtatacagtataccagctatgtaccaacatcttgataaacattacgcttaattctcacaacatcccactgaagtaggtgctacttttatctccactttataaagggaggaaacctacctcagagaagttaagtaacttgcttgcggtggcacagtgagtaaatggcaaactacagacttgaccccaggcctgcctcacttcaaaacccaagactgtagccaacctctccaaagtgatgctgatgaattcttttttcttagtgactcatattccattattagcagtggttcttgaccttttagggattgcagaaccatttaagagtctgtactgttgcctagaaaatggtgtgcataaaacatgtatacagttttgaattaaattttagagatacatagcctctagcctgcaaacccctacaattgaccagtgaggctcttatacttctggggggctttacaactttccaggcttttggaatcttctgctaaaatgcaaatcttctgctaaaatacaaataaccctgtaagagttagatgaagttacataaccttatgagagaacacatgaagtgcttatcaactaaaattgtgacgttttgtctggagcagaatcttagtaaatagaaactaagattcctggaagcacttcttacaaattttaccttttccccatcttttctatgaccaggcagttctggatgaatcctctaaaagttttagtacctgacactcagtcataactacagcataactctggagctacaatctcatagacaaataattctcaagatagccaatcattacttagtgaattataaagttaagctttatgttctcttccctttaattacagtagattaaaggaatgaaagaaaatcgtttaaatattagtctgtacaaacatgttaaggaaatacaaagaaatctggttcaaaaataataatcatgaatattacaaacccaacacagtggtttgaatgtatcctgtcacttttcccattgctgataaagataattgagggtaaactttttcagtgcaatttgtctgatcatctctgaactctgtgatgttcctgatgatgtttgctttataatttaaacccatagattcatttacccagtatggtatgaaacaagaaaaaaaataataaccttctcgtatttttagaaagatacatctcggatagataagcctgtcactttaacctttccattttggtgtttaaagacagagttcaccagataatacattctcaaaagccatttagaagatgtgctaaataaaatgtccttaatgagcatagaataataatcttttagaggaagtggaagcaaagaaaagaggacagcaggtaaaacattaggcactgcctaacccatatggtttcaagtgatttcttaaaattgaatggctaaaatttaactgctctgtttaccaaaatgtcttgtgaatatattaataagagcgtgatattatgcccccaaaatacaaacaaatacattttcaaataaaaatatttataagtacctatataaaaactaaacctttgtagattctggatattagaacttaaagaaatttacaataaaaaaaccatcaaaaagtaggcaaaggatctgaacagacacttctcaaaagaagacatttatgcagccaacaaacatgaaaaaaagctcatcatcactggtcatccaagaaatgcaaatcaaaaccccaatgagataccatctcacgccagctagaatgacgatcattaaaaagtcaggaaacaacagatgctagagaggatgtggagaaagaggaacgctttcacactgttggtgggggtgtaaattagttcaaccattgtggaagacggtgtggtgattcctcagggatctagagctagaaataccatttgacccagcaatcccattactgggtatatacccaaaggattataaatcattctactgtaaagacacatgcacaggtatgttcattgcagcactactcgcaatagcaaagacttggaaccaaccgaaatgtccatcaatgatagagtggataaagaaaatgtggcacatatacaccatggaatactatgcagtcataaaaaggatgagttcatgtcctttgcagggacatggatgaagctggaaaccatcattctcagcaagctatcacaaactatcgtaggaacagaaaaccaaacaccacatgttctcacttataaatgggagttgaacaagaacacatggacacagggaagggaactcacacacccgggcctgttagggggtgggggcctaaggaagggataacattaggagaaatacctaatgtaggtgacaggttgatgggtgcagcaaacgaccatggcatgtgcatacctatgtaacaaaactgcacgttctgcacatgtaccgcagaacttaaagtataataaataaatatataaatatttataaataaataataaatacataaatatcagaaagtaaaagaggaaaaaactgaaccttgaatttttttcttttagaatatttataatatttaacgtatttgaaggtgaaggccatcctacatggacatctgaagctttagctaagtattatcttttctgtaatgtgactattggtttgcagttcggttcttcttttcgaatagtatgagattaattttctcagtacttaaatcactcctcagttaagttggatgttcatggaggaacattctttccttcaggttgctgatacatttgctgcactgtaggggagggagtgggtatctgagttagtcagttttaccatttataaaatgtttggtggaggaaattgaaactaattgctaaattgttagtaaccagtgcattaactaggaccctactgagtggactgaaagaatcgaaaatgtttaactggttgagaggcaatgatgttgcaaatggggtattcttcaaagctccttctttttttaaatcttcaaaggcaattattctgaatgtaaactacagaccaaattgcagtcttctgtaagcatttcagagattacctcaaatattttttgattaaaaaactcttccgtggtcttttgtgcttcagaactacccagtacaacagggtcttcagcctgctcaggatctctaaagagagctagcacacagtcagccaactttggctgcttcaactcctaggaacaagaaatgatgctgagataatttgtctggcaggtattatcagcccacaatgactgctgtcatttagcctcaaaatgtttatttttccttttacaatgctgtatttctttagaaccttcctattccgagtgtggaccctaggccagccccatagacttcccctggggacttgtcagaaatgcataattttaggccccaccccagacctgttggaccagaatcttcatttaacaagatgcccaggtgattcattcatgtttgagaagctctgctttaaatcactaaagcagttactgagtaattactaccatcatgactctgaagagctcctatagccttcaaatgcrcctaactctactctaaaggcaaatgtcctcactgggaaatctgatctgctgtttcagagaagtgcagggctacacagtgtcttacactcytatctattgatgtttcttggttttgcctggtaatctgctgcttaaatggattatttgatgacatattgatattaaaacagtcctatttttagaaaaaataaaaataggaaagatgaaagcactctgagaaaacacttgcacagataccaaacgtataatattttcagcaatgttctttaaacctgtggtttctgttcgcatgtcactagtttgttgccttttaagacaatgtcagaaaaatccagatttttggtcagctgatgaaaatagtttaaaaagtaggtatgtgtgctgtattttcttatttaggaagacattagattctgaggtcagagtcagactagaagacatatattttctcattcatcttttatgcatctatacctgctaatcaaatgccaagtgttcattttaatggccagaatgttaggaaggatggcctagatcagaagggtctcatggacaaaatgcctttagggatcaagaggataaaagaatttagccagcctggccaggaraaggtgaagggtgagtatagcttgcctaaacaggacagctacccctcagtattgtcctgtggtaatacaggcttagttagggtgactatattgtcttgttttaagaagaaaaaatagaaatcttcatttttgtgtgaaatcttaaggtttttaactattggcaattaaatcaagtttctgtgaattaataatttcttcctccctctcttttttcttcccttctaaatattgtgtagtccaataaagcttaattaggaacacaattaggagaggtttgccaattgatgacaccaaaaagccccaaaccttacaatttacactagttttattctcttttcccctaaactttttctagaatgaaaaaatcagaaattagatagaatcacagttcaccacctttgcctctttactctctacctaagttagatgctaactaatggtacaatgaaactctgaaagagaattattagtaagtttatcttatataataagacagtgtataagatattgtatactatcttatattatcagataagcataagataatacttatcattcagtaagcagtttgtttactatcttayacaagataattaatacttatctttatattttaatttaatatttttaattaaactaatattttaaattttaatttaatgttttaattaatatttttaatatttaatacaagataatacttaccttgtataagatagtatacaaactggttactgaatgataggaagatggttaaacatayttattactatcattcactatcatgtagaaaactctatttcatagtcccatatagtagagaggaacctggttgccttttcaagaatttctatcaggtgacaaccaaaacagattgaatgaatgcatttttataagcttcataaacatttttaactttttttttttttttagacagggtctcacactgtcatccagactggattacagtgttgctatcatggctcactgcagcctccacctcctggggtcaagcaatcctcctgcctcagcctccctagtagctgggattacaggtgtgtgacagaacacccagttaatttttaaaaaattttttttcttagagattaggcctcactatgttgcccaggctggtctcaaactcttgacctcaagcaatactcctgccttggcctcccaaagtgctgggataataggcatgagccatcatgcctggccgaacttatttttaaattctttgggaatctaaaaggactatgtgctttcttttttactggattatgtgagaagataatagtttgcagagaaattcagtgaagcagctgataaaatgctttaaaaatatatttcagagaattgagcaataacagtgatgtcaaaatagtagccccaccttctccagcccacctaaaccaacactgagcatggacacatgcatttcttgtcatcagccagacgaaatggagtagcaaaaatccatcctatatgtcattgagtcttataatacagttctcttttctctgcctattaataaaagaccccactgaatgaagccggaattcttttaggcaatttaaactttctgaaatagaggaaagttggaaaggggcggtagtcaaggaatatagaagtaaaaaatatttttgaggtcaaatgcttatctgaacagattgtctagtctgattatttttaaaagtattatgttgataccagtgttttaatttgaatcaaaagtaatgatttaaccaaagttgtgcttccattattaactcagaaacactaagaaacgaaatcactttttcacttcttatttcccactgatgctgacaaaagaaaacctgagataatcaaagacccacaactaagtaagacctctcaggatctcaaagccaagtgttttacagagaagagaagatagaaaaggcatattatctaggagtggaaaagaattttatgctgaaaatgttgaagagagaattcrwaatcaaattcaacattccacctaggaggcttccatctctgcttaggagctgagtaatggaggtgattggtgtaagtgttcagtacctatgaagacctaactcttgagggagagactccaatgtaaacttcctactcaatactgccttaaaaaaaaaaaaaaaaaaaaaaaaaaaagtaagtccttattcccaaagtgactaatacaaaccaagcactcggtcaagggctactgagggaatgactgcaataaaaagcaatctctgtgtagacttcatccttgtcaattgttagcgactttggtcaagaagatattttggaaaataccattcactactctacattttctatggtgctgttgaaaaataaaaaataaagctttgatctggaaagctctgattctcattctcattatctttgtgatcgtggaaaggatgtttattctttccgagtatgttttctttcctctaaaatcagagactacattatctcttatatcttgtcccatgctaaaattctatacatcttattctaagatttcaacaatatctatagaaaaagacaaaaagactaggaattatgagaagagagagagattataaattctatatgaggaagtttcatctaaaacttatcttctcctatcaaaagcaagttgtagatactcttagttaagccacacctgccttgtaaatgccaaacaggtccattttaaagtgtagtaaaaactacattccattctatttttaaacagctttattgagaatccacatgctatgcaatttacccacttaaagtgcacacaattgagtgatttttagtatattctcagtttgcagctatcaccactattaattttagatcatttttatcactcccctcaaaaacctcacactcattaacacttgctcctcattccctcctccagctctgggcaacaactaatctactttctgtctgtatgaattatgaattttcctattctggacatctcatgtatatggaataatacaatatgtttgactttttgtgactgatttctttcactaagcataatgttttcaaaggttatccatgtcataccatgtatcgataaaattcatttctttatattgcttaataatattccagatcctttgcctgtttttaaattatcttgcctttttactattgagttttttgtatattcaagatacaagtttcttatcagagatatgatttgcaaaatttttatttcgttttatatttcctcctggaatgcatttttttattgccatgaaagtagagagcgggtgctaagataaaataatacagaggttattttagtttggggaacggggtcaagaaagtaccctgagacacattgaggatttgatgaagctgtcttgagggcgaggagaacactgcaggcagagggagcagcatgtgcaaaggccatgagacaggaatgaatttgctgggtttaaagatgagcaggaaggccagtggaatagaaagatggtaaggtagagaagggtaggagacaaagtctgggaagagggaaggggccggtttacatacaccttagagaccacattaaggagtttgaatttcattcagaaagtagttgagtggttttgtggattttagcagcggaaatggcgtgatccaatataaactttaagatgatcctgctagctgtttcatgaagattgatgtgtgaaaatgaggtagaaacagaaccaagacgaccacttgggagacctttgctgttgctagagtgagcaatgactaaaatcagtgagcttgaactaaaatgagacagtggaaaacgagtaaggtgaatggattggggattatcttggatagagtgtcatggctaaaagtgtgtgttctgaagccagaatgactgggttatagtactaacttcctctcttactagctgtatgaccttgggcaaattaattttcctatgccaccgttaaatgaaaataatcataggagccatgatgtgaagttgttatgaaaatcgaatgagttaataatgctgtatatgcatcacaagagtacctggcacatagtgaatgctttaataaccgttgctgctattaattgttttgactactgaaatagacaagagttggtgatggtttggatggagaagaggagggaagtttcaaagacaactgacaggtatccggcttgtgtacaagacacttggtggtgccagtgcctgagatggaggaaactggggagaataagggtttgagaggaaggtcaagaatcttattttggagttgtttgtttggatggatgtgagatatctgagtggagatgtcgggcttcaagtagcatcctgggccagagatagagctggtattcaaattcgaactgaaatatactggagaaatttgcaaaacagcacttaaaaataatttaaccttgtcctggaccagccaacaggatgccagaacaatttaacaagcccagttttcttgggagaggttgcagatatagcaaaaagagtgtggacattgtcatcaagcagaccatcttttgaactttacccctccatttactatttgagtgatcataaatagttacaggtgggttagcaaggaggggtcatggacagcccccacgtttctgcttgagcaccaggtggtttatagcgccggttcctgggttggaggaaagtggaaggaagcatgtttctcggagcctcatctttctcagcagaagattagtaggccttcctcataggtgaggaccaaaggaatgtacatctggcacatactacatgctcagtaatgattttcttggatgacttggacacttctccccttctcaaccctgctgtaagcatctccaccagcctgcttaaatctacccccatttttatgtgaaaatgttggatgggaaccatgaggtgacagaccagggctaggactagggtgagggaagttaggcacgcaccttgggcaccaaacggaagggggtgccaaaaatccaggcaatcacaacaaatattattttaatgcactacttttaaaaatcaaaagtaatgcacaaatacccatggtaaaataaatattaatgtttaaataaagacagaatcagtattaactgatttctcctttcacctcaagatctgtcatttggtgcagtactgggaaaatgtgaaagcttactccccagcccccaagactctttctcatttctcccatagttgttagctaagggctagtcctcagcctcgggcaatctagtcatctctaaatgctaaagacttcagaatgtattctaacacctgtgatactgggcatacttgaggttggggcttaggcccctaccagcccagcccccagtgcttttttatctgttgcaacatagaagttgaagcaaggttccctagttcaccccacgtcagtaaaccaggccctttgacccctggaaatgttgagcaaacacaaagtaaaataacccaatgctctattaaaggctgaggtttaaaggtcagctttgtgcttattggctgcaagtctgattcactccctaaatgactatcagggagatttgtgcttgcaacatggactgaggagatgagcctttccattcagagtggggagctatttgctttataaggagctgtcctcaccaaaaggaaagcagcaggtcaggagcaggtgaaagagaatagaggtccctgaaccaggaatgcttccttctgattttgactctgacttttgaaagctaaaggtacatgtaggccgggcgtggtggctcacgcctgtaatcccagaactttgggaggctgaggcgggtggatcacgaggtcaggaatgtaagaccagcttggctaacatagtgaaaccccatctctactaaaaatacaaaaaaaattagctaggcatggtggcaggcacctgtagtcccagctactcgggaggctgaggcaggagaatcgcttgaatctgggagacagaggttgcagtgagctgagatcgcgccactgcactccagcctgggtgacacagcgagactctgtctcaaaaaaaaaaaaaaaaaaaaaagtacatgtagtggcttgtagctttcagctgtttcccaggaaaatcagaaaatcttcaactgaaatatttggtaatttagacgtcattagtaagtggataataaataattaaggttagacttgtcatagctcatatgtatcacaaggaaatatttatggagttttgagcctgtgggtcacttttcctataacaaaacctgggtgtgggaaaccaaatttttaaaagttatattatttacatatttttatttcaatttgaagaaaaatttgtctaatttttagaatgttttcctgcaaatataacagacttcataatgcacatttatgaaggattctgaaacaatagcaaggaaggagaaagagctgcatggattaatcctgagctgctgcagcacactgactgcatgtcagtggcactttaagattgcaacattttgtttggtgaccttcacaccagttgactgtatgcaccttaatctctctctcaaaaaaaagctgagcctactatagattggcatctttttctttttaaccccagtttttcatttacctacactggtttacctacacctggtttaatttgtacagcagaatgaagttctttattacaaagctcagaaactcgtctttgagtttttaggaacagtaagtacaaaggttgtcatgaattgagactgaaagacctcatagataaattgggtagtacatttttaaagtaaagaataaataacacttcagaaaaatgtagaatacgttcataaatgcacaaatggagataaaatgtcactttttgtaatgaggtttctttcagactttgacactcgtaagtaaatgttcagaggaaataaacgtcagggcatatcagcttttgtgagggttgccaatgtgtaaatgtgaggtctactgtaaatcgtgctgtccatttacctgcctctctgcaggaatttctttttgagtgtgtagtccttatttcccaakaataaatacaaagacttttcagactatgaatacatatcacatggtctctaaggtacagttgtacattatacccgtggaagttttctttcttaaataattaaacgagattttcaattgtataaaataagaatcttaaatattaagttatgatgctttctttaagagtgtctagtttccttccttctctctcccttcttccctctgtttacttcccggctaactcccctcctttcttccttctccccttcctccttcttccctcctttccttccttcctcattaattcttaaaatgttcatttgaatgcttagatgctagattgtctcatttctgcctctatgattattgcttataaatcaaagcagtaagtcccactaaaaacttaagagccaagttagtatcttcttttttagcgtcctattattcactcaaacttaatcttctttttttcccattattacaagttattactaaaactagcacagaaaagcttttcactatatcgcctcctttgaattaagatagtctcacatatatagtatttagggaaaagataaggctaatattctttggaccggcttccctattttgaaaaaatcttccctcacatccctaaaccatacagacaagcattatgcagaaaaccattaacatgactttcagttttcaagagagaaagtcaaaaattccacagaaaattagagctgttggactaaatgttggtctattaataagcaggaagaacaatttagctgttttccctgctgagttaatatatagtactgctgtctttcctgcagcggtattctccagctgggttacttggttctgggaatttcctctcaaaatgcccatttctgtcaaccagccatcagacctgcctgaggatagttgatatgacagtggtgtgacatattgaatattaatatgaaagtgaccttccctgctgtcagaaatgggtcatatatatgtgaaatccatgaaaatagatgagaacagatttaaaataaggaacactccttatattggtatacagtgttcaccatgcttgtactgaaatatggctgtaagtagcttgccttcaagaatttttaataatcatttctgaagaactgattt

SEQ ID NO: 94439 - DNA, 15895 bp, Homo sapiens
ggcacagaagctcatctcagtcatcctgcaggcacatgagggggtgccctccggccacctgtactgtatcagccccaagcaggtggtgagttggggtatgggctgggagctgtctgcattggccggccagtgggcatgggacagtgctaaggctgctgtgtctatgccaggtggtccctgctgggggcagcagtaccatctacatctccttcacccctatggtgctcagccctgagatcctgcacaaggtggagtgtactggctacgccctgggtttcatgagcttggacagcaaggtgagctcttccggcctggggtgggggccgcagccactgctccctcctgggtagcatgctgcctactcagcccagggatcagctgtgatcagacttgggctcagtaggtggaaagggagattccagggaagaggcatcgcctgcaggactttgcggtgggacccctgaaactggacctgcatagctacgtgaggcctgcacagtgagtcagctggggtgccccatctcctttcatccccatggggtgcaccctcaccaggcactggtggagccaggcagggttctcagagcaaaaggacgggcatgggtggagaagtcagcagaggagcccagggaaaggctggcccgaggctggatgagcagagtgggggcagccagaaggccccaggcgcccggcttgccccaacaatgcctattgctgggcaggctaagtgtggagctggactacggcggcagtatggaattccagtgccaggccagtgacctcattcccgagcagccctgctctggggtgagtgtgctgccaccctctggccctgccagcttacctggacctcagatgtctctgtgtgcccttgtgggactcaggccttatagtctgagcccaaatcccctcccccagccctcccagccctaccctagagccatggggttgaagagagagacaagatgcattccctgcctcctacctctgtggctgcccaggtgctgagtgagctggtgaccacccaccacctgaagctgaccaacactacagagatcccacactacttccggcttatggtctccaggcccttctccgtttctcaagatggggcgagccaggaccacagagctcctggccctggccagaagcaggagtgtgaggaggagacagcctcagcggacaagcagctggtgctccaagcacaggagaacatgctggtcagtgggggagtctgcagcccttgcctcgatggcacaccctcacatgtgtacagacagcacccctgcacgccaccctcaggtgcttgtacccagacgcaaactgcatgcctgaccctgccataccctgcatgaacactcgggggtgcactcccaccagagacaccacattcagcacctctgcacaagtggctcacatgggcatggccacaccagacgttgtgttcacatacatgcatgcacgtgctccataaatgtccccagacttccctttccctcttagtccccactgctgagatgctggtggaggctgatgcattcctgtgagcacctccccttcccacacacacagactccgtcctcctgtgcaagctcagggtttgtgtcccagctcaggtgagcccatggggttgccataattgtaagacactccaggttctaacgtaaaatttcctcttctgacttattctcagtgacaattggatcctggattttcagagttggttaggtaggggaaggtcttgggaatgtcaggacctcactggaaaccatcaacttcctctggtctctgaggcaactggaatgaggctgagtgtgcgcacacccatatctgcacagtgggcttccagggtgtgcagaggcaggctgagggtagacagcgccgccctgtctcctacttcccctcctgcttcagaggccctctttcttcttctcggagggcttccctttatgctgtgctcccttgagctctgccaggtcctagcctcactctgcacatttctgggttgtctcatccatttccagagcctcagtgaacagccatattatttctatccaatgtatactccactgtgtagcgagggcctgctgtgtactagatgctgtgctaggtgatggtactccccgaggacctcatcatggaggtcagggacacacacggatctgcagaagacagaatggcacccttgacccactttgcgtttgctcccttcaacgagctaaatggatgggaaggcccagagcacagccagaggttccattccaccagagcttccaaggagacacggcggttagccaccaggcatttaaaagtccttggcagctctggggaagcccaaaagttccagaaaaaggacatcacataattaatggtgctgcatctcaccctccatgcgctaacaatgctcaggcttctggctcctggccagaattatctcccaggctctagagccaaactcaatctgtccaaagtgaactccccatcccctccccaccttgtcctgccccacatctgtgcctcctttttgtggtggcattttgtctcagcaaataccaaccccagcccccttgctcatgcccagagctctggcaccccttgtcctagacccatctctgaccaagccaccaagccctgcggatgccccctcctaaagttctcccaacactattctcttttcttcatccctacacccatatcttggtttaggacagcagtttctaagcctggcaatagatcagtggcctttttttttttagattgggtcttgctgtgtcacctaggccggagtgcagtggcgtgatcatggttcactgaagcctcgactgcctggggggttcaagcaattctcccacctcggcctcccaagtagctgggaccacaggtgcatgccaccatgcccagctattatttgcagagataaggtctcattatattgcccaggctggtcttgaactcctgggctcaagcgatcctcccaactcagcctcccaaagtgctgggattacagatgtaagccactgctcccagcaaattagtacccttgacaaagcttgttaaggcagcagctcccagaccccacctccagacatgtgaaggtctgggtgaggcgcaagaatttatatttttaacaagtgcctcaccgttgattctgagaagcttgtaccaaggacctgtgctgggagccaggagtccaagcttcatcctgtccagcctcagttacagcctcagcccctggtctggcatcatcacactcatgtgtggtctgcagcccacctccccaccaggtcagtgacctgtcagaggctcctcactatcctcagcacacagaccaagtccttcctctgcctctgagcccaaccacagccctgggcatttgaagctgtaaagggcaacttgctcatgtcccttcccttctagcctctgacctctgagggcagacatgacttgtccctgacactagcagggtgctgggcagagtaggtgctgggcagcgcttgtggaatgaaagcaccaggttggggagctgctgggctgttggctgggcaaggctgggcctgggaggaaaggaggatggagctccaggtggggaagtggccacctgccctctgcagccggagttgacaccatgtccacatctgctcaggtgaacgtgtccttctcactctccctggagctgctctcctatcagaagctcccagctgaccagacactgcctggggtggacattcagcagagtgcgagtggagagagagagatggtgtttactcagaacctgctcctggagtacaccaaccagaccactcaggcacgccccaggcccacctacatgtggaggagggtggaagtgggctgggctgtgttctgctggggccagaggaggaaagacctagcagggccctcagaaataaggagcccctgcccctgtcctggggctcagtctcccctagaagaggccctgtgtgcagagagatgagggccatccaacctcacctgcctcatgagctcaaaaccaggtgaggggccagagtgtgggaaatcagggaaggctccctgcgggaggaaggacatgaagcctgaacaccatttaatcaaggaagggaaacacgttgacagccaggccaaaagaaaggcctgatgggtgggacagagcacctgaagcagctgcgaaggacagccctggggcttgccaggcttcaagcaccagggcgagcaccatggaccaggtcaccaggccgtagtgtggaggctaagcaggggctgctagtaaggagtgtgaaggagtggcctggggaagactctagagaggccgggggcaggaggctgagcagtggagccgaggcgctctagcctggcacctgggcagctgctggggctgaggctgtgggatggtgcatggcagtgcctgagtgtgatgcaggggctgccaggagatagaggagggcacaggtggggcctgcggccaaggaacacagacaaatggtccacggctgagaggagctgagggctgggccttgggggccaccacaggaggagcagtgaaggagggcagagcccaaccagccagggtgcagggactgaagctttatgagttagggaggcagggacagcgggggaatggatggcatcaccctggccctttccctgtgcagactcccagtagcagcctgtggccttttaaggtggcgctggtcccctgccaacttctgggagcttcccgttttcttcaggagcatcagcacttggggtcagcagggttctgtgtgtcccagaggccctggctcagagcccacccagaatggacaaggttgcctggtctcccacaggtggtgcccctgcgggctgtggtggccgtgcctgagctgcagctctccaccagctgggtggactttgggacctgctttgtgagccagcagcgagtccgggaggtctacctgatgaacctgagcgggtgccgaagctactggactatgctgatgggtatgtcctaccctgccacctacccaccgttcccctacagggctgtgccaagagaagaccccccaggaaggggcccctgtgcgccgtccctgcatgctggctcccagggcaggcaccacttggaatttctgcagagcagccagtcccccaatcccacatgatctcagggttgccctgccctgcagtgctgagcaagaccagaggtacaggcccgggggtgggtaaagtcttcctgtgggagtacatggggctgcctgcactcatgtgtcttcccttccctttggtgcaggccagcaggagccagccaaggccgctgtggccttcagggtctccccaaacagtgggctgctagaagcacgatccgccaatgcacccccaacctccatcgccttgcaggttttcttcactgccaggtgcagccccttccaaccttccccaaactgcccacagagcctggaccccctgcccaggtgcctcctaacctcagcccccacatgctccccacaggagtagtgagctgtacgagtccacgatggtggtggaaggtgtgctcggtgagaagtcctgcaccctgcggctccggggccaaggctcctatgatgagagatacatgttgcctcaccagccctgaggctccgccccagccctcagccccaggccccagctggagaaaaaacattgcccagggattaggagcagctcttcagcacaaagacacagacttggggacctggggacctctgggcagctcctggaatggaagaacccccttccacaatggtctcagcctaggccctcatgatatgtcctcagagctaacataaaggacaggccacaccacagcagagaccaccacattgagatcactactcagtgcatagcgaagaccagtatggcaaaattagtcttggaaaaaaaccacagccactaagataaattcatgcacttttactatgcccattgcacttctcatccatggatttgccttgccttaagaattaaccatggccttgtggcctgggtgacccaggctgcttttatcttgcacagctaaagagggtctgatgggtggctcaacaccccacccactcctataccatgwcatcagtgttcacattttccaaatgagttgaagtgccttgatctgtccactgccaccaccaccagtgctgagttttcccatgtggttttgcttttgtggtgttactgccttgctgctagagcagcaggactgtctgcgtagcgcctccagcctgggacctcactcagttcccagggtattcaaagacggcagcggctcccattccagtcccgatgcacatggacaccactccgtatgccctgtgaaaacaaaacttaattggctgggcaaaggcacccaccaaattacctccagaccaggctgacccagaaggacgtcatggacaagtaggatgcaaaaccatcagaccagatctgtgggcaagcggtaccctggcctcccacttgggcacacacacggtgacagatgcccactgcaggctagtatccctttcaaggctggcccttaaggaaaacagggatcatgcccctacatcctaagttcagggtgtttctgtgtgcatgttcccctccccagggatcgatcataatcccaaaagacacaatcccaaacacaatcatcccaaatgttgaaatcctggaagaacaaaatccctaaagtctaaaatcctgaaaatcacaatcctaaaagatcaaaatcctgaaaatataattctggaaaaaataatttggaagcctggcctggtggcatctacttgtagtcccagctattcagcaggctgaggcaagaggatcacttgtgcctaggagttcaagaccagcctaggcaatatagcaagaccccatcttagaaaaaaacttttttaaaagattgatttaaaagatatttacatttttaggccaggtgtggtggctcaaacctgtaatcccaacactttgggaggccgaggcgggaggatcacgaggtcaggagttcaagaccagcctcgccaacatggtgaaaccctgtctccaccaaaaatacaaaaattagctgggtgtggtggcagacacctataatcccagatactcgggaggctgaggctgaggcaggaaaattgcttgaacccaaaaggcagaggttgcagtgagccgagatcacaccactgcactccagccagcctggacaacggagtgagattccatgtcaaaaaaaaaaaaaaatgtacatttttaaaaggggatttatttgagaaacaaaaacaacagaacacttcacaggctactttacacaataaaatagaaaataattacaaatttctgcaagcataaacactcaggtatgctaacaatagtcacaggattataacaattataaacagacaaactgtattcataaataggttaaaagcaaactgtataaattgctggtaatcatgtgcacccagctttataactgcagtcatatgaataccatgatggacaacctacgtcttttgatgagattgatcaaaaactgatagagccaggcactgtggctcacacctgtaatcccagcactttggaagctaaggtgggaagatcacttgaacccaggagttccagaccagcctgggcaacatagcaaaaccctgtctctacaaaaaatacgaaaaattagctgggtgtggtggcacccacgtgtagtctcagctactcaggaggctgaggtgggaggattgcttgagtcagggaagcagaggttgcagtgagccaagatggagccactccactccagcctgggcgcctgagtaagaccctgtctcaacaaaccaacctgtgatgggtcaccactgcacaagtagtcaaccaaagaaccaagatcttgagaaattttatctttcacaaacgcaggtgcacaaatagcacacctcttttactgaggaagtttcaacatttttatgtacatgcacaaggcttacaaagtcaatgtgataatgcactttcatggaatcaaatttctgatgtccaaggcagaaaaaaagtgtgtcccrgctctgagagagacagttcaccttctgtatttgttctctccagggccccaggcaattagctgrtgcctgccaacactgagggcggatcttccccacctggtccactcagatgcacacactaacctcctctgcaaacaccgtcacagacacacccaaagcaatgctttgtcaggtttctaggtattcccaaaattaagtccattccttgtcaacttagcacccattcacatctccttaaaccatacttaattcaaataaagacaataacaaggtaatggttgcatcatattagttacatggtataactaatatgatgcactatcctgcatacagcggaaaatgcactaatcccttccctagaattcataacatgaattcaacattaggatttcaacattcaggattttaatcttttgagattgtgatttttgggattttagacagtaaggatttttctccttgactagtcaagtgtagaagtaagaagggggtaaagagtagaacatggagtttgatctgtaactgaacaatcaagataactcactacctctggaccagccaagaccttagggactttgatcttttgggatttcaacatttgggattatggtgctcaggactgtgtctgtcgagattatgatccaaagcccacctacctctatcccctgcccttcaggtgccctaacttggatatccccctatgaccccaccgccaggagcaaagccttacctcttcccacggcgcttcagctcattgagcagcgtgatgacctgtcgtgccccagtgcagcccagtgggtgccctaaggccactgcaccccccagggggttcaccttctcaggggggagtcgtagcttctccacacagtaggcagcctggaaggaggcagatcatcacctatagccytcttacccctcccctgcaccacctgcccgctcactccacctcggctgtccagggcaaaggcaacattgagaaacaagggctcacctggcttgcaaaggcctcattgatctcgaagatgtccacgtcactcactgtcagccctgcagacaaggtaaagacctgagctgacacactggccctctgcctcccctggggcccaccccatccatgggcctacaggctgcctggtgtgtgtctcttccagaagggtgagccaatcccagctgtggggtcaggaagggcttgaagtatgggacactagcctgccccacctccactctgcagcacccacaggaccaccctcatgcccctggcaacagcatgcagggcagctgcaggatccaggtgggacccagatactatatgaaggagccaccttacctgctttttgcaaagctactgggatggcataggcaggtccaatgcccatgatgtcaggtgggaccccaaccactgcataagacctcakgaccccaaggatgggaaggcccaactcttctgccttggacctccgggccagcaggatggcagctgccccatcactcacctggctagagtttcctaggggcaaactgttggggtaagaaggcatcggggtggggatgaggagatcccagccctcccacttctactttgcagaggggcctggtctattccaggttcccagagtacagcacccagcatggccatggcctgctttctcatacccctaccccggaccagtctcaccagctgtggtagaamcatctttcttgaaggcaggcttcagtttggccaggccytccatggtggtgctggggcggataccctcatcctgggtcacagtgatgctcctcttggtgcccttgtcatcmtggaccgtggtggtcacaggcacaatctcagcttggaaacagcccttgctctgggctcttgctgccctgccagcaccatggacagccagcttcagactcccttggggttcccttcctccctgcccccaacccctatccatttgggtagacacaagctcaggctgctaaattcagggacatgctcgactttgggggagctctgagggcatggctaaggccttacagggccttcttcaccatcagccccagacctccagatcgtggccaatcccaacctcaaaggggggaaagggtgtttggaagtggtgcctccacttagagccctttgtccaagagggattaagcctgcttgattctctctgctaaactgaggatggaaccccagaaatatctgtgctgggttctgctaacttttctgctcaaactcaacagttcgatgtcatctattccccagtttccgcctatttaaagtgacatatactaaactactcatgtatttttgtatttaagcaattttaaagcacaaggtatttaagggtgacccttgcaaatatgtgcagcatgtaagtgcccagggacattcaagtggaaggaatctaaggcttctaacacattttcaaatggttatgtgacccaaagtggctaagaatcactgcctcagggaagcccacctggcccagataccactccctgcttttgctttcctctctggacagccgggacttgccaatcttagcctgcctgagcccctggggtttctctgatatcgtcctcagttcttgcctcaggatgctgccacagacccagcatggtccagaagctaggatgccagagtccctaacattgctggccccacactccaggctacaatgtccagtccccaaaccgcagccagaaaataacagagggggaaactgaggcctagctagggcaaagtcagggtgaacagacagtaatagaacctggaagtactaccaactcacagtggccctgacacttcctacttcccacccccaacctgggtggcacaaggcctggaaagcactcactgcccagcagtaaccacgaaatggtgccacttcagaccacttagatagactcaaaacctcactctccagccctttaaacattcctccccaatcagcactcacttctgctgggaagccagggcaaaggtatcctgcttctcccgtgaaatgccaaaccgctcagccacattctcagaggttatcctagaacacaaacagcagatagtgtgggcattggtctgacagcctagaggaagggaccaggctgtagagctgtgcttggaactttgggttcccaaggctgtaggcaggacaggatgtaagggccagtccatgccacagacagtagtgatgactcaggatatggtacagcctgccctgaaagtggatataaaggcacagatagggaagtcagcaatgctggccagatcctgagaagctcatacaccaaagagactttcttcaagagagggcagcctgcatgggggcagttgcagaaaggagtttgttccctgggtgagctgcctcagcgcagggtagaaaaggagcaggggagggcctgggtgggggcactagttggctactcctggccagcttctcctatgcctcaaggaagactgctgcaatgtagggagatgaggactcccaaatctcctctggaaaggccaaacctaagcttcctggtcaccttggctggggtctatgcttatcctgagaacctagagccacagctaggccttccagcctgggcttctggctttataggcttcccttggagatacagtatgtgaaagaagccatggcactgcccctctccaagcctcagtctcctcatatgtctagtggatccaggactcctggcccaaagaccctggggatggcccagaggctcagagaagctaaagtgttccatacaaatgccacatacttttctttttttcttttttgagacagagtctccctctgtcacccaggctggagtgcagtggcacgatctcagctcactgcaacctctgcctcctgggttcatgccattttcctgcctcagcctcccaagtagctgggactacaggcgctcaccaccgcgcccggctaattttttgtattttcagtagagacagggtttcactgtgttagccaggatggtctcgatctcctgaccttgtgatccacccatctcggcctcccaaagtgctgggattacaggcatgagccatcgcacccggccaaatgccacatacttttcttgttgcacctgacagggcccaattcccctcaccagcatgttctgtcgtcacaagcttcccactgccttctcaactttctaggcccccaaggctttggagtggagctaccattgtccttcctatgactgagcacctcagtgtgggagtgacaaggtgggcgatgtttggaaactcgggggcacagagaggacctggggccttcaggaaatggaagtcaagggcaacatcaagtctcatccccaaagtccctgcggagcagaccatgcccaaaggaaggaggccaaggcttggcaccaccagccacagagatgataaaagttccttggctccctgccccaggcagagagggcacaagcacacagagctatgggagcactcaccccataggaatcaggcaatctctggccttctccttctccatcaagcgcgaagtaatatttccagggttccctctgtcagccagggacatggactccaccctggggaggaggaagaggaggagaaggtaaggtgaactgggccctagcaggactcctccagagatagctgaacacttggcaagtgctaggaaatagccagggagccctaggaagaccagtgggcctctgggagtcacaggcagggcacttggccagcaaggcccagccacgagtactgagccctgtctctatttcgacccccaccccaggacagagcactgcacaataaacactcctgggggcagggctatgcttccctatacactgctaaatcagccaactggcaattccagagaaaagccttctgctgtcagccacagaggaggaaacacatccacaagccagggcctgccctcagggcccacaaattcagaagggagaagagacaatttgaaagtaaccacaggccggctgtggtggctcacgcctgtaatcccagcactttgggaggccaaggcgggcagatcatgaggctaacatggtgaaaccccgcctctactaaaaatacaaaacattagccgggcatggtggcaggcgccagggtgggaggctgaggcaggagaatggcgtaaacccaggaggcggaacttgcagtgagatgagatcgtgtcactgcactccagcctgggcgacagagcgagactctgtctcaaaaacataaataaataaaataaaaataaaagtaaccacaaagctgagctcaaagggcattcagacctgcatagacaaggaagtgctacgagctgagaggaaggagacggcagtgtagtgtggtcaaaaaagggctttgaggccatgggggaccctaacacctcaagggatgataacagataaccttgactgagtgcttttcacgtgcccagcactattctgaattcttttgagatattagagtgcttcagtgtcagtcacatgacagacaaatactccacagtgtaaactgttgctattactccatttattcttctcaacttcaacagagctgagctaggtatccccattttatagatcaggagactgaggtctagagagactgtataacttatccatggtgacccagcctggatccacatttaggtagtctggtcccagagcccacttccaactagagtgccctgtgttaaatacttgctgatcaaagtctatggagaacagtcagcctgtgatgtgggtgtcaggcctggcccagatcttaatatcctagtaccatcatccttaacctgcttgggaatcagatactctctaagaaactcataaaagctccagcccttctcaagttatccatgccacctctcacccagtaagatagaagagcatgagagaaatcaaacggcagtggcctttgcccagccaaagtccttgcagagtggtctttggctttatttacaactgtagacataggtcattacaactcagtgacagctgccacagccctgggacaggggccagcaatgcgtcctctcaagaaataccctaaagaggatgtgaaaggcagcggaggcatgtcagaaccctggggctgctcacctcccccagcctgccaaagaccttactcccctgccctcccagcaccagatgcccacccaagcctgggcacctgtgccctgaccttccctggaggcactgccaaatacaacttctgcagctccatttgctgcagccaatgatggagccacagtctaggtgaaggtgacagtgaccaaaccaccacagatctaattatgtccctcatagcccataagcagctggaagtttccacactggttccaaggtggggagacaaagggacagacagcctagtaaaatgaacaaactagttatacagtaggcgctgtccctggctttagggaacccaaactgcaacttctctctcagcagcatcatgaatcaacaagggcccccaaaggaaacccaaatgctggattttctcaaaatgttttcccaccttttccagcctgaaagatttccaagaaagtaagcttttagaggccaattcccctcccctgctagtgctgagaggtgtgagtgattcctgagcagccagagttggtagccactcttaacctgcatttgtgagaacccactcgtggccagctgcctaaaggggatggggggaatcctgaaatcatggcctctgagaactcagatgaaaattagttttattgtcacaagttggttaataagctccggcagaaaaaaattcttacccacaggccatgccaatgtcataagacccatttctgatgccacctgtaacaaaagcatttcataaacatcctttgccagagtccacctgttctggaagcagtggagcctcttccccacctggtctctagatgggactcagccccagcctcagaaatggaagacccaggagtgttcagaaaaggctttgggcagtggtagggggcgctcctgcactctttctgtggttagagtcctcagaaatggtaattattgcttgcccggcagacagcgactttgctgacccaaacccacaggtccaggaccaaggcacccacccagtcataacttacctgctatgctggccactgcctgtagccccgacgaacactgtctattgacagtggacaaaggcacagtctccgggatgtcactgaaacagaaggtgagaaagtagaatcagcccccaattccatgccaggctctcatggaaagcagtcctatgcttctaactgcccccctcaagggatgtaaagggcaggggaacaaacccagcagctctgctcccatgccaggccagatccatggaatgggggtgagcagctactgggcagaccccatctctgcaggcacttgctccccagggccccacaagcacattcccttctactcctatgagaatcttcaatcaaagaccaagcacagcccaaaggcaagggaagcctgtttgggccacagggatccttctctctctctccctttgaagattcagaaatgaaaactgtgtatctctgtttcccccaaaaaacagagaaaaggaactgctgctgggacagagcaccagagcaaaagaaatgcctaaagtctgaggccagggaccactcggccttaccagtaatcatatagctaaccctgcatgttcccatggactcttgaaagcctgatcccacctagacgaagcactctgatgggcatcatatattctaacatccattgctctggtaggttccccaagactctcatactggtcttagccctggaagctagtagggcttcccctcctgatgtaacctgccttggccaacagtacaaagccctagggaaatttccagacctcctcagaccca

SEQ ID NO: 94440 - DNA, 271884 bp, Homo sapiens
  misc_feature (1)...(271884): n = A,T,C or G
atattcaaattctcgttatacattctacatagtgtactcacactcgtccatctggaaaaaacgaggcttcctaattgcaaaaaacactcctgccataaatggctctctcatcagcaaactccttcaagctgccaggcttctacagaaagttgccatcatttattgcaggggccaccaaaccccggatgatcctatatcagctggaaataggctagcagatcagataaccaaacaagtagccctccaacccatgcaaggccagtttctgtccctgtcctttttctctcctctttactcctcagaagaaaaggaggacttccaagcccaaaaccttcaaaagcaaggaccatggtatgtcaaggaaaggtgctttattcttcctcactctcaaagccttcctcacctccaaagcctccacaaccctttccatatcagttacaacctctcttgcaacttctctgccctattctcacttgccctcacctttccagccatgtttgagaaattacctagtcctgctctgtctgccactcagtgtcaccccaaggctccttccagccaccttttcctacccaccaagcccagggccaggtacccaggcaaaattaacaaatggacttcactcacatgctggccaataaacggctccactatcttctagtctttatctgtactttctccaggtagataaaagcattcccaacaacttcagaaggtataaatgtcatcacacaaactctcttcatgcatataattctccgttttggacttccaacattcatccagtccaacaacggaccctccttcatcagccaaattatccaaggcatctctacatccttaggtataaaatgggttctccacacaccctataggcctcaattctcaggcaaagttgaaaaaattacgtctgtccttaaagcccaactcaccaagctggctctaaaaactcaccagtcgtaaacaaaaaatctccctttcacccttataagactccacacaacaccaaaagcaccctctttttatagtccctttgaaatcatatatggccaaacttttgtcttggggtctccacccttaccagactctgagccactcagatattacctctcctccttaatccagacatggtctttcattcgtgaagcagcaaataaggccatgcctctccctgttaacacctttttgtcctctgaacgtaactgtcttacaggcacagacgtgtttccagacaatccagatgatgcttctgctacagcgacatggtaaataccaacccgtctctcaacaatacccccaaaattaagattttctttttccaagatgtccacgtcaccccctatgtcatgcctgaagtaattattgagtaagtggtcccttttcccttttctctaaccaaatagacaggaatgtaagattctcccggggcctgaaagcttaaggagatgaataactcctcccttctcaggcccagtcccaaggcgcaagggccacttgtgtcagcagtgtgcaccagcagcgtgcgccggcaagatagcagaagcatgaaaagggccggccagaagacacctactctggctggaagacacgtacccctgaagatcaagaaagaagctatctgggaacaatgtagcagttacgtcagaccaggacacttcctgtttacaggagactataaaacctttgtcctatcatcacttgatgtggacgccattttaggcctcagcccgcctgcacccaggcactgattaaaacagcatgttgctccacactgcctcgtgttgtctgttggcatgctcttggggttcaaactgatacaagaaccttacactaggagggttgtgtttttccaggaatttattaatctcttccagattttctagtttatgtgtgtaaaggtgttcatattagccctgaatgatcttttgtatttcagtggtgttagttgaaatatctcctgtttcatttctctgtgaggttatttggatagtctctcttattttcttggttaatcttgctaatggtctctcaattttatttatcttttcaatgaatcaactttttgtttcatttatctttcgtaaaattttttttttcaatttcatgcagttcttctctgatcttggttatgttctttgtctgctgggtttgggtttggtttgttcttgtttctctagttgcttgaggtgtaaccttatattgtctgtatgcactttttcagactttttgttgtaggtgtttagggctatgaactttcctcttagcgcctccttagctgtatccgaaagtttttgataggttgtgtcattattgtcattcattttgaagaattttaaaattttcatcttgattttgtttttggcccaatgctcattcaggagcaggttatttaatttccatgtatttgcatggttttgaaagtccttttggagttcatttccagttttattccactttggtctgagagagtatttgatataatttcaattttcttaaatttgttgaggttcattttatggcctatcatatggtctatcttggagaagttccatgcactgttgaatagaatgtgtattctgcagttgttggatgaaatgctctgtagatatctgttaagtccatttgttccaaggtatagtttaaatccattgtttctttgttgactttctgtcttgatgacctgtctattgctgtcagtggagtattgaagtcccccactattatgattctatctatctcatttcttcattctattagtaattgttttataaatttgggatctctagtcttaggtgaatatttgtttaagattatgcggttttcctgttgtatcaggcctttttaccattatataatgtccctctttgtgtcttttaaccactgttgctttaaagttcattttgtctgatataagaatatctactcctgctcagttttggtgtccatttgcatgaaatgcctttttgtacgcctttactttaagtttatgtgagtctttttgtgttaggtgagtctcctgaagacagtagacggttggttaattcttatccattatgtggttctgcatcttttaagtggagcatgtagggtatttacattcaatgttagtattgaaatgtgaggtactcttgcattcatcatgctctttgttgcctgtgtactttgtttttgttgttgttgttttaactcgtgtttttgttttataggccctttgtaatttatgctttaaagagattctgttttgatgtgtttccaggatgtgtttcatgatttagagcttcttttagaagttcttgtaatggtggctttgtaatggtgaattctctcaatatttgtttgtctgaaaatcacagtatctttccttcatatatgatgcttcatttggctggataaaaaattcttggctgataattgttttgtttgagaaggctgaagataggaccccaatcccttctaggttgtagggtttctgctgagaaatctgctgttaatctgttaggttttcctttataggtttcctggtgcttctgtctcaaaactcttaagattctttccttcatcttaactttcgataacctgatgacaatgtgcctaggtgaagatctttttgcaatagatttcccaggtgttctttgtgcttcttgtatttgcatgtctaggtctctagcaaggctgggaaagttttccttgattattcccctaaatatgttttccaagctttcagagttgttttcttcctcaggaataccgattattcttaggtttggttgtttaacataatccaaaacttcttggaggctttgtttatattttcttattcttttttctttgtctttgttggattgggttaattcaaagactttgtcttcaagctctgaatttctttcttctacttgttcaattctattgctgagactttccagagcatcacacatttctaaaagtgtgtccaatgtttcctgaatttttaattttttttttctttaagctatctatttcattggatatttctcccttcactttttgtattattttttggacttacttgcattgggctttgccttactttgatctctccctgattagcttaataactgacctcctgctttctttttcaggtaaatcagagatttcttcttggtttggatccattgctggtgaactcgggtcggggggtgttgaggagccttgttttgtcatattaccagggttggttttctgcttccttctcatttgggtagactctgtcagagggaaggtctagggctgaaggctgttgttcatattatattttcccacaggctgttccctttatgtagtactctcccccttttcgtgtggatgtggcttcctgtgaactgaactgcagtgattgttgtctctcttctgggtctagccacccagtgagtctacctggctctgggctggtactgggggttatctgcacagagtcctgtgatattaactgtctatgggtctctcagtcatggataccagtgcctgttccagtggaggtgacacaaggggcaatggactccatgggggtcctcagttttggtggtataatggcctatttttgtgctggttggcctcctaccaggaggtggcactttccagaaaacatcagctgtagtagtgtggagagggactggtggtggatagggccctacaactcccaaggttatatgtcctttgtctcctgccaccagggtgggtagggaaggaccattgggtgggggcagggccgtgtctgagctcagactttccttagttgagtcttgctgtggctgcagtggtggatgggggtgagactcccaggtcactggagttgtttaccaaggcagattatggctgcctctgctgagtcatacaggttgtcagggaagtggggtaaagctggtagccacagaccttactcagctctcactcaaaccgaagggctggtctcactcccaccatgccctcagcaacagccctgaacctgtttccaggtgaagggccagtcaggcttgaaaattttcccaaggttttcttcacatttgcaaatgaaaagggctttagttctttccccacctgtgaagtctgcaaactggattcgcgccctcccctgagttctggccttgagacttctcgccctgttcaaattgttagaaatttcagctagagaagttcttctcattgtggagttttaccccctgctcctctggccaccctcctgatggatccctgtggtgccaggcaggaattgtctgcttggggatccagcgagctcccagtgcctttctgctacttcctctatccctgtgtttcgctgggtttggctctctaacttgactcggctccaggtaaagttgggaacttctcccacaaacagaccttcagcttctccattggggatgtctgtttgggagaggagggtctcccttttccacttccatggttggggcactcacagtatttaggttgtctcccgtgtcctgcaggagcagtctgcttcctttagagggtctgtgggtcctctcaggattgctggtctgttattgcagtcgatctggagctaaaattcacaatgcaagcctccgtatgctgctctgtccggagctgcaatctagtcctacctcccatcaaatttacacattttaaaataccatttacttcctaatctgacaggatatcaaaccaggttcgtccagctttcctgtctgacacctctttagtttccttggtaacaaaactttgctccatgattccggtaacaaaactctttagtttccttggtatcaaaactctgctccatgattctggggtctgattttgaataaatgcaacgtcagaagcaagagtgagctgagtactttacagctgtggaacctaaagcaaaaaaaacagacacagcatcccaattctaattctgactctgatttggattcagatccatatttcccccagactctacagacacatcacttctcctcctttgttccccttccagttctgctatggaagaagcaacatctaagatgacggaaattatttcagagcccacagttacactggaaaatgaggtaaaaaaaaaatagaattctgctcactaccttacagaaaaacaagccagacaaaagggtggaatggttaagagacagtgttgacaatgagcacttggactatcgctcatctaaatgctgctgcatttatcaaaagcctcatgcctttggtgaaagctcctcagagagtgaaaaagaggatgaagaaaattgtaatttcatgctatatttctggggtcatcacaatggacggcatcattcccttcccaatagggcttctagtactttatctaaaaaaccttgagacacatctcatcctcttccttcacccatgaagggctaagcttactttgcttcccccatccctgaatgagactggactaaaatatatccacgttgctattcagggattaaacatattttgaatcttttttgatgtgtgttctatctctcttctgtctgatggaaagggtagcaatgaaggaagacaaggggagagaaacaaagggatcaatagaatacctggaagccctggtactgcatgactactattctacaatacacatgtcacatgtatattcttgtcttttttagagatctggaataacttctcctatattttcttggctagtctattatcatgacaccaaacccccactttccacagagctaccattttctctatacttgttacccataatagtttctatcatctaatgagtaccagattattctttaccattaattggaagctttgtaatcttgtcacctgatatttacccattacactttattcttgcttttatcctgggtgatttcaatatccctgtagataagatttcatataaactaggtatttctcctctacttttatttaggaaccccacagccatagtcataccatgaagctaatgagcactagtactattccacatctaagttttataattagggatcttattttctcatcccaaactcctatcttttgacttctgtctcatactcgcttacaacactattttgtgaattcatggagactcctagtcacccaaatttgtgctgacctctcaatcagtcaaccttctgggtataacttcttttccacccaaacttctgacccatcaacagcattctttcccgtgttcttacttcttcactcttttgtgaaacctctcttgccaattccaaattatgacatgtgactcaggaaaactaaaatgaagtgtttgtggacttggggaaaggtggtatcaaagaaacatcaggaaactatcaagaggtagaatagtagtttaaatttattacatgttttgtgtgtgcctagcattttcttcaaggctttatgtataataacccaggaattctgggaaagtctcagtctttatctcttcaaatatattctgcttcattctctttttcctatttctttgagactccaatttaaacctatgttacacttccttctatatttgttaatattatctttatttttctgtctcttttaaacatcatttggatcatttcttcttatcagcatttagttcaccaatatagcttgatttatatctaaaaagctattaaacccatccacttaattttgtttccttatactcttcagtcctagaatttcaacttagtactttttcccaattgttagatcccttattatgaggacctgaataattcaaattctctgtaagaaacttttggcttgactttgatttccttgcacatactaagcataattattttataacttgtgtctgataattgtagtatttacaatcctggtgaatttgtttccattgtctgattttctctcctagttcttgctcatagtttcttgttttcttgcttttgtgctttttttattccttgattatatgctatactctattttaaatattatttgtagaaatttgaggtcgaggataatgatatcttcctccaaaggaagtgtgtgtgtgtgtgtgtgtgtgtgtgtgtgtgagtgtgtgtgtgtttctatgggtttctgaggtcagtagaaatccgggattatcttaatccaaatttagagtttagtatttttgaggattccaaaattaactaaagttgggttgtagctcattacagcttccgtttggttcaattcacttttattcatgattttctggccattataggtcaagatcaaaactacccactcttggtagactgaggactatgaattttatcttcctagcacaatgaagtcaccaaaagtacagatcttcctctcacscattactttagactcagcaaatattcctttcccccagagaaaaataggttccatgttctggactcaacactagattccttttctgttatagacctctgtctaatagttcctcactattttgcctattttttagctttttttgtaattgcaagaatattttgaatttttttgtagccttttgatttgttttccagttccaacccagggaatgttgatctaagttatctttttatacctttatattcactattttatcattacaataatgccatgaggtagataatattgttatcctcacagtacatcttagaaactgagatatagagttaataatttgccttagataacacagctaataagaattagaaatgaaatttgaacccaagcattctggctcaacagtctgaattcctcaacatttgctttttctgaattattaggcaattaatccctctggcaaaacagaaattgttctatgtctacttgggttagagttctggcagaacataaacattagaggttgtaggttaaaacaaaacaagcccctgggatcccaccaagcatgcttttggtgggctaggaagataaattttgtgaccaggatctacttttcyaacaaaggagactttcattctatcaataaatttccatatgcatgatatgcttggaagattcaagccagcctaggggccctcttggaatataaagatactaatagtatgtcttttgactgaaaggccccagtttggattgaactgatatctgtatagatggagggatgaaggatactaattggggaagaaagtgctagccccctcaaggaaagactgacagtctgaatcacagaattgaaagggcatgacaattccatttggatttgacataagttcacaaaggaaatagttgtgtagatcatgaagattcctgcaaggtgaagtaaggtttatgggaagcaaggacaaaattcagaaaatggtgttaagaaaatggtgagggagagggctgaggcccagccaagttctctaagattgttctcaatggggaactaaagtggataaatggaaagtagtgacctacacaaagtgccagtcagccaaacaaaacatgccaaatgtcaagtgagtaggaaaatttcagctcttaaaattacgtaggctttaataattccaaatttaatttgattctcagaatatgggaggagactacatgcacagttctaaagccatcactgtttttgtttttatgatgtttccagttatttctaggctctctagtctctctcgtaactaagatagacatattcaattctgtatttatattcctttgccagtttatacttcataggtacaatccattactgttataactggtctataaatgtcttgttttcttctaactcttagaacagtgataaaaattcattggcatgcatgtagtccgtgttacagcctagatgraacaagcacatatgctcatgtgtcatttctgactcagtggtatctctacaaactctcaaacttcttgtagaaattttttatgttggcctaccagggagatctgttacagtaatgaaggaactacttaactgctccccttgagccctgaagaagttaataaacaaaaacatcactgaagtcttagtaattttgtgtgttatactccctgatgcatttataactgaccagaaaagctggcagatttgtaaagagattcctcctctgctcatgagatataggaatgcctacaaccaggtctatggtaytatgtagatcaataactgtcttatgaggagtagctagccaggggctttttcttctacttctgttatgactagtagagatatgtcattttgtgtcattgttccctggtggtcacgtgatagatagtgtgggagagttggcattttagtcaaatatctgacctcccctctttctattgtaaacactttggttttagctgggcaaaatacccgccatgagctgcttaagtcagggatttaatgtaagataattcaacttctaccttatttaaaaaactgtcattgtggtttctgaaaaactgaatttatagctttactaatacagaatcaaactattttttaacagggtgacaaattgcaacattgtaaaggaaggcttaatagaaaaaaaaaatagtacatagtaatagaactgcttgctgagttccaaracttttagaacaaggtgaggggggaggacttttccttccaattccttcttcataacattggatggagtccttttggtgggtattttgacagcttcctttttgttttgttttcttttgttttgtttttggagacagtctccctctattgcccaggctggagtgcagtggcacaatctgggctcactgcaacctccgactcctggactcaagtgattctcatgccccaacctcccaagtagctgagattacaggcgtgcgccaccacgctggctaatttttatttcatgatattttgtggagatagggttttgccatgttggccaggctggtctctgaatttctggccttaagtgatccgcccgcctctgcctcctaaagtgaggggattacaggcatgagccattgtgcccagtggacagcatcttttgttactgctcttttcctagaaaatctccagtgtggggttgctaggtaaatacaaaacatgcatttaaatttgaactttggataatgaataatgtttacttcatgcatatttaaaagatatttgtgaaaaaawttattgttcatctgaagttcaaattcaactgggcatcttttttaagtttttgtattatttatttatttttttaaatgatgtgctaagtttggcaacacacctccagagttttctgtttttctgactactttcttcaaacttcactttataaaatgtcaaaaagcagcacaccacaggtcttaattgatctctccattgctgttcctactttaacatcattccattcacctcacacaccaattttatctcactcaatgagaaatcaacccacttttaaactatttattatattttcaggagtgtgtgtaaggttaactttaaatgtaaataagttaggggcctttcactatatttttacatttgttgcgcactttagttctattattattatattgtaatatataatgaaataattatacaattcaccataatttagaatcagtgggatgcctgagcttcttttcctgcaactggacagtcccatcttggggtaatgggagacagtgacagatcatcaggcatccaattctcataagcagcatgaaaccttgcatacacagttcacaatagggttcaatctcctgtaagaatctaatgcagccagtgatctgacaggaggcggaactcaggaggtagtgtgaaggatggggagcagctgtaaatacagatgaagcaggctggtccccatggttcacacctgtaatcccagcatttgggaggctgaggtgagcagatcacttgaggtctggagtttgagaccaacatggcaaaactctgtctctactcaaaatacaaaaattaaccgagcatggtggtgcaccctagtaatcctagctactagggaggctgagacaggaaaattgcttgaactttaaaggcggaggttgcagtgagcccagatcgtgacactgcactccagcctgggtgacagagcaagactctgtctccatggcccagggactgggggcccttgctgtataggatgtgtgaaaactctgtgcacacaatccaggtgtgtagcagtggtgtatgatcaggaacaaggtactgaaattagtcccttgtctaatccaagctgtagctatggcttaaggaagtgtgagggtaagttagcatctggtggtcagtgagctgcaattgtctcgattttgcttattttggggccagtgtttgttcagttgctagagaaaaagaaagaaaaaaaaaccttgttgcagttagaatatagtctaacctttaggtgttggggatggtacatgacttatccctttcctggcatgcctttaggtcttgtttataatttggtatcttgttgctacaaaaagtccttttccatcactcttatgatctctactttaatactatcatcaaaactgattacacaagttcatctgttaatgttcatttttattgagattttatatatttacacttcaaaaatttcttttcacacatatrgaaacatatatgaattttaaaatatgcatcttcatgaaagtccaaataacactatttggactatagtttgagttcagaaattatatctgctgaaaatttgggtgggagtaaatatcttccttcttagtttaactttattttcaagtgtttgtctttattttgtttataattggcatgtaatcgttgtctatgcttatgcaatacagtgtgatgtttcaacatgtgtgcattgtataatgataaactcagtgttgttagcatgcccatcccaccaaacctttgtcattttttgtgaagataactttcaagattgttatttacagctgcctgaaaatatacaaacatatttattagttattgccatcccactatgtaagagagcaccaaaacttattctttctttctgactggaactttgtaccaattgagcaaatgtttccatcttccattctccactcccatccccagcctctggtaaacagtatgctactctttacttctgtgagatcaacttttctaaattacacctataagtgaaatcactgtagttttctttctgtgcctcgcttattttccttaatattgtgtcctttaggttgatcccttctgccattaatgacaggatttttccatttttatagcagaatagcataccactgtgtatgtataccrcattttctttgttaattcatctgctaaaggacacttaggttgattccttttattggcaattgtgaatgatgctttataaacacaggagtgcagatatgttttcaacatactgatttaaatatctttccatataaacccagtggtgaaattactaggttatgtggtggtttaatttaatattttgaggaatctccgcagtgttttccataatggccaggctagtctacaatcctagcagtagtgtacaatagtttcctttcttcgtgtccttgacagcatttgatattttactttcttcttgatagtagccattctaacaaaagtgaggagatatctcattgtggttttgatttgcatttccccagtgattagtgatattgtgaatttgtgaatttcttatatgcctgctggccctttgtatgtcttcttttaagatatgtcttttcagaccttttgtccatttattaatcagattatttgggggggggtgtttttctattgcatgatttgagttcgttatatatcatgaatattagcctattatcagatggatggtttgcaaatattttcttccattctgtaagttgcctctttgctctgttcattgtatcttttcttgtacagaagctttttagttcagtgtaatcccatctgtctatttttgttttattgactgtgcttttcatgtaccaccaaaaaaaattattgatcagactaatgttatgaactgttttccttgtgkttttttctgatagttttatagttttgagtattatacttaagtctataatctattttgaaatgatgtttgtatgcagttaaagataagggtctagtttcattcttcttcatatggatatccagtttttccagcaccatatattgaagagactatcttttcttccatgtgtgtttttggcagctttgtcaaaaaatatgtgaccataagtgtgtagaattaattttgggttctcaattttgtcgcattgatctttgtttttatttttatacaagtaccatgycgttttggttattattgctttatacagtatttggaagtcaggtaaggtgatgcctccagctttgctccttttttatttgttttattttttattctgatatgtatttaaatacaaggtaaaatattacaatcatactaacagaaatatgagaatttttagtgaaacaagatgagtgattctagagcatttattttcagtaaattttaactcaattttatactatatatactatgctatttgtactagaagtatttgtaattttagttaatattgataatttattttggtgaagagaaatttcatgaacctatctattctgacacctctctatcatgacaaagagatatataaataatttaaaaaattaactccttttcaattgcaacaaaaacaaaaattgacaaatgaagtctaatcaatctaaagagcttctgcatagcaaaaaaacctatcaaccaagtaaacagacaacctaaagaatgaaataaattttttggaaactatgcatctgaaaaagatctaatatccagcatctataagaaacttaaaaaaaatctactagattaaaacaaacaatcccattaaaaagtgggcaaatgacatgaacagacacttttcaaaagaaggcatacctgtggccaatgagcatattaaaaaagcttaatatcactgatcataagagaaatgcaaattaaaaccacagtgagataccatctcacaccagttagaattgttattattaacaacaaaacatagcaggtattggcaaggttttggagaaaaaggaacacttatacactgtttgtgggtgtgttaactagttcaaccattgtgaaaggcagtgtggtgattgctcaaagacctaaaaacagaaataccattcaacccagcaatcccatgactgggtatatattcaaagtaatataaatttttctgccataaaacatatgaatgcttatgttcactgcagcactattcacaatagcaaactcatgaaatcaacctaaatgtccatcaatggtagaaaggatgaagaaaatatgttaaatatacaccatggaatactatgcagccagaaaaaagaatgagatcatgtcctttgtatgaacagcaatggagctggaagccattatccttagcaaactaacacaggaatagtaaaccaatactgcatgttctcacttataattgggggctaaatgatgagaacacatggacacatagaggggaacaacagacagtggaagggaggagggggagaggatcaggaaaaataactaatggacactagacttaacatgtgggtgatggaacaatttgtamaacaaacccccatgacatgagattacctgtataacaaacctgcacaggtacccctgaacgtaaaatgaaagttaaaaaaacttccttttaaaaattttattttagtttcagtgagtacaggtgaaagtttgttacctgggcaaattgcacgtcaggctttgatgtacaaattgttcacccaactattgagtatagtacctgatatgcatttttttaatcctcatcctccttccacccctcaccctcacgtaaactatgrtgtctattgtttccttttttgtgtacacgtgtattcaatatttagttcccatttatatgcagtgttaggttttctgtttctgtgttaatttgtttaagataataacctccagttgtatccatttcactgaaaataaggttatttcattttctaaaaaaattacttccaaccatggtgatgggattattttgtttttctttatgcctgcatagtattccatggtgtataagtacaacattttctttatctagtacaccattgataggcatttaggttgattccatgtctttgctattgcaaatagtgctctattttttggaatagtttcagtggcaatggtaccaggtcttctttatattttggtagaattcggatgtgaatccatctgcaggaaagtctggtccagggctctttctgrttggtaggtttttcattattgatttattactgatgttcattattgatcatatttctcatttgtttatgaagattagtttggccggatataaaattcttggttgaaattatctttaagaatgatgaatatgggctccaatctcttctgacttgtacagattctcctgaagaatttgcaagtttcttgatggggttttcttttgtgagcaacctgtcccttctctgcagctcttttatatataatatatatttcattgaccttggggaatctgatttctatgtgtcttggaaatggtcatcttgcaggggttctttgtattttctcaatttgaatgtgaacttttctagtatgcttcagaaaattttcatrgacaatatgcttaaatatgttttccaagttgctttttgtctctgtgtctctttcaggaatgccaattctttgtaggtctggtctctacataattctatatttcttggaggtattgtttattttaaaaagaattaaaatttctttctgrtagagttgatttgaagaactggccttaaaatcttattctattttgctcatcttagtctrtcttcctgttaataatttctgattgtattacagaattcttgtagtgagtatttcagctcttatgatcagttttgttctttcttaaaatggctattttgtctttcagttgttgaatcatttttggattccttatattccttggattttgttttgactttctcctgaatttctgtgatctttgtttccatccagattctaaattctgtttgtcgtttcagccattttggtctggttaaaaaccattgctagggagctagtgcagttgtttggggataagaagacattctggcttttagagtttcagagttcttgcactggttgttttgtatgtgtgtgggctgatgttcatttaatctttgaagtcrctcttctttgtatggtgctttttgcttgtattttctttggtgtccttgaaggtttgactggtataagttgggtttagttgatggccttcatttctagatgattcagggggccaacattcagctctgcactactgggctgtgtaatttaaccatgggtagatggtaccaggcctgtgattttgttctctgtctcctccaggttaagcacctgctgtgctggatgggccaaggtgctccctgtctggtggcaacaatactccaatgggagtgctggcgaaagtgattcatttgagtagtggcagtgggttccatgcatgcatgcatgcttgtgtcagcaggatcggtgtgcaagtgtgtatccaagcagtggcatggcattgacatggtcgkgtctgcaagtgcacacagtctccactggcagagtgcagtggggtctgcacatgtgtgcacaccaccagcagcagcatggcagtgttcacatgtgcatgtgccagcacatctgtaggggagactgtgggtgagtgcacatcagcagaagctgcgggtggtgcttatcagcagaagctctctgatggttaagcaagatctgtcagtgtaggagctatgaagttggctgctgggaaatgcctcagttgggcatctgagtctgtgctacaagcaactatagccaggcagggaccctgggaaaggctggtagatagggggatgctcagatcacactggccgcatcctacaggcaacataaccctattctgtacaggactgatagtcaacaaaatccaaatccacctacatgaacatgttatgcctcagggaatgggcatccatgatggtgctccactgcagccattctggcaccaaaacctctgagtcccatgcaggctggagccctgtccctgccaactccccaagaagctctttctgctagctcaaatgcctgttagggacatggggttttctgcagctatgattctggaggtttgtggactccttctttacaccaaatgcaaaaattaaatcaagatggattaaagatgtaaatgtaaaaccaaaaactataaaaatcctggaagacaacctatacaatactgttctccacataggaatcagcaaagattttatgatgatgccaaaagcaattgcaacaaaagcaaaaatcagcagagtaaacaaacagcctatggaaaggaaaataaattttgcaatctatgcatctgacaaagtctaatatgaagcatctataaggagcttaaacaaaactacaagaaaaaaaaacagmcctattaaaaagtgggcaaaagacataaacaggcacttttcttcttttctktaaatagctacctttatttgtaaagttcatttttaaaaattttgtatttcaatagttttggcggtacaggtggtttctggttacatgtatgtgttctttagcagtgatttagagattctggtgcaccatcactaaagcagtatacactgtactcaataggtagtcttttattcatcaccccaatcctacctttccccttgtgtccacaaagccaattatatcattcttatgcctttgcatcctcatagcttagctcccacttataagtaagaacatacatcatttggctttctatttctgagttacttcacttagaataatggcctccggaactcaccacagcacagaaaagcagctatggccagactgccttactagattcctccccactgggcagggcatctctgaaagaaaggcaacagccccagtcagaggcttatagataaaattcccatctccctgggacagaacacctgggggaaggggaggctgtgggygcagcttcagcagacttaaatgttcctgccagacggctctgcagagagcagcgtatcctgacaaggaggattctcccagcacagaacgggagctccactaagggacagactgcttccttaagtgggtccctgacccccgtgcctcccgactgggagacagctcccagcaggggtcagcagacaccttatacaagagagctccagctggcatctggcaggtgcctctctgagacaaagcttccagatgaaggagcaggcagcagtctttgctgttctgcagcctctgctggtgatacccaggcaaacagggtctggagtggacctccggcaaactacagcagacatgcagaaaaggggcctgattgttagaagaaaaactaaaaaacaaaaagtaataacatcaacatcaaagaaaaagaaggaaccccatttaaaaaaacccatccaggcatggctggcaatatggctaaacaagaacagttctgatctgcagctcccagcaaggtcaacacaaaaggagggtgatttctgcatttccaactgagttacctggctcatctcattgggactggttagacagtggatgcagcccatggagggtgagcagaaacagggtggggcatcacctcacccaggaagtgcaaggggttgaggaactccctcccctagccaagggaagctgtaagggactgtgccatgaagaatggtgcattccaacccacatactatgcttttcccatggtctttgcaacccacagaccaggagattccctcggtgcctacactaccaaggccctgcatttcaagcacaaaactgggcatctgtgtgggcagaaactgatctagcagcaggagtttcttttcgtaacctagtgacgcctggaatgccagtgagatggaaccattcacttccctggaaagggggctgaagccagagagacaagtggcctagctcagtggatcccacccccggaaagcccagcaagctaagatccgtgaaattcttgctgccagcacagcagtatgaagtcaatctgggatgctccaggttggtggggggaggggtgtccactattactaaggcttgagtaggcggttttccaatcacagcataaacaaagctgccaggaagttcaaactgggtgragcccaccacagcttggcaaagccactgtagccagactgcctctagattcctccattctgggcagggcatctttgaaagaaacacagcagccccagtcaggggcttatagataaaactttcatttccctgggacagagaacctgggaaaggggtggctgtgggcgcaacttcagcagacaaatgttcctgcctgccagctctgaagagagcagcacatctcccagcacagcactcgagctctgctagggacagactgcctcctcaactgggtccataacccccatgcctcctgactgtgaggcacctctcagaaggagtcaacagacacctcatataggagagctctggctgacatctggagggtgcccctctgggatgaagcttccagaggaaggaaaaggcagcaatctttgccattctgcagcctctgctggtgatactcaggcaaacatggtctggagtggacctacagcagtctccagcagacctgcagcagaggggcctgactgttagaaggaaaactaacaaacagaaaggaataatatcaacatcaacaaaaacaaccacaccaaaaccccatccaaaggtcaccaacatcaaagaccaaaggtagacaaatctataaagatagagagaaacaagcgaaaaaaggctgaaaattgcaaaaactagaaggcctcttctcctccaaaggatcacaattccttttcagcaagggaacaaaactgaacagagaatgaatttgacaaattgacagaagtaggcttcagaaggtggataataacaaactcctctgggctaaaggagcatgttctaacccaatgcaaaaaagctaagaagcttgaaaaaaaggttcgttgaattgctaactaggataaccagtttagagaacataaatgacctgatggagctgaaaaacatagcatgagaacttcgtgaagcatacgcaagtatcaatagctgaatyaatcaagcagaagaaaggacatcgaggttraagatcatcataatgaaataaagcgtgaagacaagattagagaaaaaagaataaaaagaaacgaacaaagtttccaaagtatatgggaccatgtgaaaagaccaaacctatgtttgattggtgtacctgaaagtgatggggagaatggaaccaagttggaaaacactcttcaggatattatccaggagaacttccccaacctagaaagacaggccaacattcaaattcaggaaatgcagagaacaccacaaacatactcctcgagaagaggaaccccaaggcacataatcgtcagattcaccaagggtgaaatgaaggaaaaaattatcaggtcagccagagagaaaggtcgggttacccacaagggaatcccatcagactaacagcagatctctgttagtcagaagagtggggccaatattcaacattcttaaataagagaattttcaacccagaatttcatatccagccaaactaatcttcataagtgaaggagaaataaaatcctttacagacaagcaaattctgagagattttctcaccaccaggcctgccttccaagaactcctgaaggaagccctaaacatgaaaaggaacatctggaaccagccactgcaaaaacataccaaattgtaaagaccatggacactatgaagaaattgcatcaattaacggacaaaacagtgagcaagcatcataatgacaggttcaaattgacccataacaatattaaccttaaatgtaaatgggttaaatgccccagttaaaagacacacactggcaaattggataaagagtcaaaacccattggtgtgctgtattcaggagacccatctcacatgcaaagaaacacataggctcaaaataaaaggatggaggaatatttaccaaggaaatggaaaacaaaaaaaaagcaaacattgcaatcctagtcgctgaaaaaaacagactttaaaccaacaaagatcaaaagagacaaaggagggcattacataatggtaaagggatcaatgcaacaagaagagctaactatcctaagtatacatgcacccaatacaggagcaaccagattataaaccaagttcttagagacctacaaagaaacttagacacccacacaataatagtgggagactttaacaccccattgttaatattggacagatcagtgagacaaaattaaccaggatattcaagacttgaactctgctctagaccaagcaggcctaatagacatctacagaactctccaccccaaatcaacagaatatacattcttctcagcaccacatcacacttattctaaaattgaccaaataattgaaagtaaaacactcctcaggaaatgcaaaacaatggaaatcatatcaaacagtctctcagacaacagggtaatcaaattagaactcaggattaagaaactcactcgaaaccccacaacttggaaactgaacaacctgcttctgaatgactactgggtaaataatgaaataaagacagaaataaataagttatttgaaaccaataagaacaaaaacacaatgtggcagaatctgtgggacacagctacagccatgtttagagggaaaattatagcactaaatgcccacaagagaaagtgggaaagatctaaaattgaaaacctaacatcacaattaaacgatctagagaagcaagaacaaacaaattccaaagctatcagaagacaagaaataactaagatcagagcaaaactgaaagagatagagacatgaagaaccctttgaaaaatcaatgaatccaggagctgttttttttaaagatcaacaaaatagataatctgctagccagactaacaaacaagaagagaaagaagaatcaaataggtgcaataaaaaatgctataggggataaactactgatcccacagaaataaaaacttccatcagagaatactataaacacctctatgcaaatatactagaaaatctagaagaaatggataaattcctggacacataaaccctactaagtctaaaccagaaagaagtcgaatccctgaaaagaccaataacaagttctgaaattgatgcagtaattaatagcctaacaaccaaaaagagtccaggatcagatggattcacagccgaattctaccacaggtgaaaagaggagctggtagcattccttctgaaactattccaaacaatagaaaaaaagggaatcctccttaactcattttaagaggtcagcatcatcctgataccaaaacctggcagaaacaaaaccaaaaaagaaatttcaggccaatatccctgaggaatatgtgaaaattctcaataaaatactagcaagccaaatccagcagcacatcaaaaagcttatcraccatgatcaattcggcttcatccctgggatgcaaggctggtacaacatacctgaatcaattttaatgcaatccatcacataaactgaatcaatgacaaaaaccagattatctcaataatactgggtatatatacagcattgcataataaaaatcatgctttgttattattcaataacaaagtaagtcttgtggcactgtgccttaaaagtgtgkcattaaaagtccacttaattcttcctttcttttcttgacatggtgagtatgcagtaaaaataattgtgggttggtgatatatgggacactcaaaacacttttgagttgtgactgcatcactgcaatttttagtgggttgagctgcagtgcaaagtgacattgggtcagttttgcagctactcaatactgtcagtgtggctgaaaacagctatgcataatataaaaacaaatccatatggctaggtataaaaactttatgaggaatgaaatttttattttatatacttttcatattttataaaatattattttattaatcattaaaaatgtaaaagccattcttagctaatgggtaatataagaatatatagcaggccatgcttgacatatagtttgtaatttgctaatttctcttttagaaaactgtgatatactagtttaggttaataattgttgagaagatttacagaggctctgagggaaaagaacagataatgcattggaagaaataaggataagttacatattagactcactttaatacaaataagaaaagttttttttaccttctttattatgacagaaaaacagaatgatcaaacaggcttccactcaagagatactgtcctgcaagtgaggcatttgaatagtataaaattagaaggatgtgaaggaagaggggtagtgtattaacatatcaattttaaaatacagccatttaaagaagagtttctctctctctctccctccatccctctctctctctctcttaacagcaccagagcaggccatttatctgtgttcttgtggcactttaactatataaggccattcagaaaatgattcatgctttttttatcttgtttgtctaccattctgtacaatgtggtcttcatctgtatgatcaaaggcaaatcaccaccatatttgtattccaggctgtaagacagggagaagtaaaagaccaggacaagtgactttaactaagtaatacacatcgctttcattcacatctcatcagccaggacaaaatcagatgaccacacctagctgcatgggaggcaataaacttgtctctagttaagtggtcataggcgagtgcttcaaacgtgttttccctattactgaaagagagtgttgtagatgagagaccgaagatacagtctctttttacttgataaaagtggtaaattttcttcaacagaatttctattttacttcttaataaatttattagaagtgttttacagaaattttcagatcatttatttatttaatgagtcaaacacgcatgaacaggcactcttccarataatccaaataaagtatctagctagatgacatatttactcacatggagctaacattctagagaagaacatatagaataaacaaagattcaatttaataaaaatgttaagaacaatgacatttagataagttgggttaataatcagattactgagtagcaaaattgtaagtggaaacatgcaaaactttaaagctagttctggctcttgcaccaacaggtaattttctgcatttgttttttaatagattacatcgttatcttaagtcatctgaacctatagagatacatacagggaacacctgctaggagtaaggttaggcaaagaaattcagttgtgtctttctcatgttgatccatctgataaaagaatagctagaatagatagataaagaatagcaatttttgcactataaatctaataatgtgggccaggcatggtggctcacgcctgtaatcccagctgtttgggaggcggaggcgggtggatcacctgaggtcgggagtttgagaacagcctgatcaacatggaaaaaccccatttctactaaaaatacaaaattagccaggcttggtggtgcatgcctgtaatcccagatactggggaggctgaggtaggagaatcgcttgaacccgggaggcggagtttatggtgagccaagatcacgccattgcactccagcctgggcaacaagagcaaagctccgtctcaaaaaaaaaaaaaaaaaaaaaaaaaaatcgaatagtgtgtcttttttttttttttttttttttctgttaagcatgtgaacgttggaatgctggagatgacctttgtactatttggtacttgagtctttttaattatcttctttgcttattccaagaagaagtttagatattcccttatttgggcttcacataatatgtctgcctaattctgccaatatgtaccaaagtgtattttgcacttttatgaaaaatagagaaggttcaatgatggcctaagacatagagtgcttttgtgatgtagttttaagttatatatgtcattttacaaaatactatgtgaatttccaaactttggaagtaaaatttgtctagatattgaaatatgagtttggagccaaagaatgttttttaaatargattgttatcatagtgctattgtggcaggccaggtctccattagcaaccagaacagtcagtttccactaaccctttactatagttytgatgaatgtataagttaaacattaaagaattggagaaactagtgctttagtacaagggctgggatgtgaaaacaaaaccattaagaccttgcctgggttttctcagaacttaaagcctgataaaataatgaaggcattcttacacacaccttgttccagggcccattaagattaacaaatttttccaaggctctgaattaaacttccaggccccagaccctagttaaagattagattgagtgaaacactcctgtttatagttgcacacgtgcatgcaggcatatagcttgaatgtattaatgtataarcaagtgctgaaaaaaatcttgtaactttgggttggtctggtgaactaccctgaccttctccttatggccagttacagaaataaactctcttctttcccagtctgtctgtaactcgttaattggaccatgagaccaagtagctggactccagttttttctgggtatactatgtttgcttgacttttgatatgctgggttctttgaatatgcaaatgtctttatttaaaatccattttaatttccctgctgaagccattgaaggaaggccacagattggatgaatcatgaagactaatattttacttgatttaggaggaatgcagttcaaaatgactattgcttagagattctggtcacaataaatataaccttgactgcatttaaatggaaagtcttttatacttctgaaatggctagtttagtgtcctaaactaatgtgtggaccattgtaatttaccatgaagacttcataaaacaaaggccatagacattgaacaaactgtgagctttatttagatggcatttaaaaatttattttgacatatccttgcaaaagtgattggaaccataattggaagttggatacagcaataattgtgagcaatttattgtggcatctccttacagagatatatattctatacaactaaactccttcaaatacttgaagaacatctgtaagggatcaaaatatgccagctcagttccctttctacacattaagtagaagctatcaaaaaaataaattaagaaaaccatatcatttgtaatggcatcagtaagaataaaatagataggaataaatttaaccaargaggtgaaacattatggcattcaacactttaaatgtgtgaattgtatgatatatgaattgtatctcaataaagctgtttaaataacaatgtactatattcttaaaatttgctatgacagtagattgaaagtgttctcaccaaaaaaaatagtgcgtttgttaggtaatgcatatgttaataagcatgatctagccaatccacaatgtaaacatattttaagacaccatgttatacaccattaatatatataatttttgtctactaaaataattataaataattaaaaaacaggagatattacaattgatactacagaattacaaaagttcacactagttgagtatgaacaattgtacaccaacaaaaaagataacctagaagaaataaaaaaaaaactaagaaacattcaacctaaaaagactgaatcatgaagaaatagaaaatatgaacagactaacaattattaaggagattgaatcaataatcaaaactttcccaacaaatagaatcccaggacctgatggcttccctggtgaattataccaaacatctaaagaagaattaaaatctatcttctcaaacacttccaaaaaattcattaggagataacacttccaaactcattttgcaaggccagtattagtccaaagcctgacaaggatactacaagaaaagaaaatataggtgaatatccctgatgaacaaaacacaaaaattctcaacaaaacgctggccaactgaattcaaatgcatattaaaaggatcatacaacataatcaagtggaatttatttctgggataaatggatggttcattatatgcaaaacaaataaatgtgatacattactttaaaagaatcaaaaacaataaccatatgattatcttaatagatgcagtgaaagcgtttaatataattcaacatctttacatgataaaatctctcaaaaaactagagttagtaggaaggtacctcaacacaacaaaggccatataccccaagtcaacagctaacctcatactaagtggtaaaatgctgaaagtttctcctctaagatcaggaacaagacaaggattctcactgatgccaattcaattcaacgcagtactaaaagtcttaatcagagtagttaggcaagagaaagaaacaaagtcatccaaattggaaacgagttaaaatgtctctgtttgcaggtgacatgatcttatatacagaaatccctaaagaccccaccaaaaactgttaaaactaacaaattccatgaagctgctgaacaaaaaatcagttctctttctatacactagatagaaactattcaaaaaagaaatgaagaaaatcatgagagtcgcttccaagacggccgaataggaacagctctggtctacagttcccagtgagatcgacacagaagatgggtgatttctgcatttccaactgagttacctggttcatctcactaggaatggttggagagtgggtgcagcccatggaaggtgagccaaagtggggggtgggggagtgttgcctcacccaggaagtgcaaggggtcaggggatttccctttcctagccaagggaagccatgagtgactgtacctggaggagcggtacactcctttccaaatgctgtgcttttcccatggtcttcacaaccaacagaccaggagattcctggagacctgcagaccaggagacctgcctggcttggtggttcccacacccacagagccttgctcgctgctagtgaatcaatctgagattaacctgggatgctgaagtttggcagggggaggggcgtctgccattgctgaggcttgagaaggcggttctatgctcacagtgtaagcaaagcaacagggaagctctaacagagcagagcccaccgcagctcagcaagacgtactgcctttctagattccacctctggggagagggcatatctgaacaaaaggcaggagacagcttctccagacttaaatgtccctgacagacagctctgaagagagcagtgattctcccagcatggcgtttgagctctgctaacagacagactgcttactcaagtggatccctgacacccgtgtagcctgattggtagacacctcccagtagggactgacagacacctcatacaggacatctctggctggcatctagaggttgcccctctgggacaaagcttccagatgaagaatcaagcagcaatatttgctgttctggagcctctgctggtgatacccaggcaaacagggtctggagtggacctccagtaaaccccaacagacctgcagctgaggggtcagtctgttagaaggaaaactaacagaaaggaatagcatcaacatcaacaaaaggacgtctacaccaaaaccccatctgtaggtcaccaacatcaaataacaaaggtagataaaaccacgaagatgggaagaaaccagagcagaaaggctgaaaattctaaaaaccagaatgcctcctctcctccaaaggaacacaactccttgccagcaagggcacaaacctggatggagaatgagtttgacaagttgacagaagtaggcttcagaaggtcggtaatcacaaacttctccgagctaaaggagcatgatctaatccattgcaaggaagctaaaaaccttgaaaaaaaggtaagacgaatggctaactagaataaccagtgtacagaagagcttaaattacctgatggagcggaaaaccacagtactagacttcgtgaagcatacacaagcttcaatagccaattcgataaagcttaagaaaggatatcagtgattgaagatcaaattaatgaaataaagccagaagacaagcttagagaaaaaagagtgaaaagaaacaaaaaaaaaagcctccaagaaaaatgggactatgtggaaagaccagatctacgtttgattggtgtaactgaaagtaatggggagaatggaaacaagttggaaaacactcttcaggatattatccaggagaacttcccaaacctagcaaggcaggccaacattcaaattcaggaaatacagagaacaccaaaaagatactctttgagaagagcaaccccaagacacataattgtcaaattcaccaaggtaaaaatgaaggaaaaaatgttaatggcagccggagagaaaggtcaggttacccgcaaaaggaagcccatcaaacgaacagtggatctcttggcagaaaccctaaaagccagaagagattgggggtcaacattcaacattcttaaagaaaagaattttcaatccagaatttcatatccagccaaactaagcttcataagtgaagaggaataaaattctttacagagaaactaatggtgagagattttgtcaccacaaggcctgcctcacaggagctcctgaaggaaatactaaacatggaaaggaaargagcaacccataccagccactgtaaaaacatgccaaattgtaaagaccatcaacactatgaagaaattgcattaattaatggacacaataacgagctaacatcataatgacagggtcaaattcacacataacaatattaaccttaaatgtaaataggctaaaggtcccaattaaaaaacacaaatctttatccaatctggcaaattagataaagagtgaagacccattggtgtgctgtattcaggagactcacctcacgtgcaaagacacacataggctcaaaataaagggatggaggaagatctaccaagcaaaaaaaaaaggcaaggggtgcaatcctggtctttgataaaacagactttaaaccaataaagatcaaaagagacaaggccattacataatggtaaagggatcaattcaacaagaagagctaactatgctaaatatatatgcacccaatacaggagcacccagattcataaagcaagtccttagtgacctacaaagagacttagactcccacacaataataatgggagactttaacaccccactgtcaatattagacagatcaatgagacagaaaattaacaagaatatccaggatttgaactcaactctggatcaagtgagcctaataggcatctatagaactctccactccaaatcagcagaatatacattcttctcagcaccacatcgcacttattctaaaattgaccacatagttggaagtaaaacactcctcagcaaatgtaaaagaacagaaatcacaacaaactgtctctcagtccagagtgcaatcaaattagaactcatgattaagaaactcactcaaaaccacacaactacatggaaactgaaaaatttgctcctgaatgactactgggtaaataaagaaatgaaggcagtaataaagaagttctttgaaaccaatgagaacaaagacacaacataccagaatctctggggcacatttaaagcagtgtgtagagggaaatttatggcactgaatgccctcaagagaaagcaagagacatctaaaattgacaccctaacatcaaaattaaaagaactagagaagcaaaagcaaacaaattcaaaagctagaagacaagaaataactaaaatcagagcagaactgaaggagattgagacacaaaaaaaccctgaaaaaaatcaatgaatccaggagctggttttttgaaaagttcaacaaaattgatagaccactagcctagcaagactaataaagaagaaaagagggaataatcaaataaatgtaataaaaatgataaagggstatcaccaccgatcccacagaaatacaaactaccataagagaatactataagctcctctaaacaaataaactagagaatctagaagaaatggatcaatttctggacacatacaccctcccaagactaaaccaggaaaaagttgaatctctgagtagtctaataacaggttctggcattgaggcaataattaatagcctaccaaccaaaaaaagtccaggaccagacagattcacagccaaattctaccagaagtccaaagaggagctggtaacattcttctgaaactcttctgatgagtagaaaaagagggaatcctccctaactcagtttatgaggccagcatcatcctgatacaaaagcctggcagagacacaaccaaaaaagagaattttaggccaatatccctgatgaagatcaaggagaacatcctcaataaaatactggcaaaccaaatgcagcagcacatcagaaatcttatccaccacaataaagtaggcttcattcctgggatgcaaggttggtccaacatttgcaaatcaatgaatgtaatctatcacataaacagaaccaacaacaaaaacctcatgattatctcaatagatgcagaaaagaccttcgacaaaaattcaacgcctttcatgctaacaactctcaataaactgggtattgagggaacatatgtcaaaataataagaacaatatatgacaaacccacaaccgatatcatatcaaatgggcaaaaactggaagcatttccttggaaaactggcacaagaaaaggatgccctctctcaccactcctattcaacatagtattggaatttctggccagggcaatcagtcaagagaaagcaataaagggtatccaaataaaaagagaggaagtcaaattgtctctgtttgcagatgacatgattgcatatttagaaaactccattgtctcagcccaaaatcttcttaagctgataagcaatttcagcaaagtttcaggatacaaaatcgatgtgcaaaaatcacaagcattgctgtaaacaaataagagacaagcagccagattatgatcgaactcccattcccaatcactactaagaaaataaaatacctaggaatccaacttacaagggatgtgaaggacctcttcaaggagaactataaaccactcctcaggaaataagagaggacacaaacaaatggggaaacattccatgctcatggatagaaggaaccaatattgtgaaaatgaccttcctgttcaaagttatttatagattcagtgctatccccatcaagctaccactgactttcttcacagaatttgataaatctcctttatagttcatatgaaatcaaaaaggaccccgcatagccaagacaatcttgggcaaaaagaaaaaagttgaaggcaccacgctacctgacttcaaattgtattacaaggctaaaaatcaactcaagatggaccaaagacttaaacataaaacctaggaccataaaaatyctagaagaaaacctaggcaataccattcaggacataggcatgggaaaagacttcatgtctaaaacaccaaaagctatggcaacaaaagccaaaattgacaaatargagctaattaaactaaagagcttctgcacagcaaaagaaactatcatcagagtgaacaggcaacctacagaatgggagaaaatttttgccgtctatccatgtgacaaagggctaatatccagaatctacaagaacttaaagaaatttagaagacaaagcaaaaaaccacatccaaaaatttgcaaaaatatgaacaggcacttctcaaaagaagaaatttatgcggccaacagacatatgaaaaaatgctcatcatcactggtcattagagaaatgcaaatcaaaaccataatgagataccatctcacaccagttagaatggcaaccattaaaaagtcagaaaacaacagatgctggagaggtgtggaaaaataggaatgcttttacattgttggtgggagtataaattagttcaatcattgtggaagacagtgtggtgtttcctcaaggatctagaactagaaatactatttgacttagcaatcccattatttggcatatacccaaacaattataaatcattttatgataaagacacatgcacatgtatttttattgtggtactattcagaagagcaaagacttggaaccaacccaaatatttatcagtgatagactggattaagaaaatgtggcacatgtacaccatggaatactatgcagccagaacaaaaggatttgttcatgtcctttgcagggacatggatgaagctggaaaccatcattctcagcaaactatcacaagatcagaaaaccatacaccacatgttctcactcataagtgggagttgaacaatgagaacacatggacacagggagaggaatatcacacaccattgcctgtcggggggtgggggtctaggggagggataacattaggagaaatacctaatgtagtgacgggttgatgggtgcagcaaaccaccatgacacgtgtatacctatgtaaaaaaactgcacattctgcatatgtaacccagaacttaaagtataattaaaaaaagaaaataaaatcataccatttgtaatggcaccaataagaataaaatatatagaaacaaatttaaccaaggatgtgaaaaatctgraccccaaaatctataggagagtgattaaggaaactgaaaaaaagaaataattgaaaatatatcttgtggttcatggattagtaaaatcaatattgccaaagtgtccatattgtttaaagcaactagagattcaatgctatctctatcaaaattccaacatcattcttacagaaatagaaaaaaattaaacctcaattatctgtctcaattttgaacaagaataacatagctagttgcatccgagttgctgatttcaaattatattatacaattatagtaatcaaaacagcatggtactggcataaaaacagacacatagaacagtggaacagaatagaaagcccagaaatataacctaaactctatggcatattgatttttcattaaagcatcaggaattgacaataagaaaaggatagtgtgacctataagtagtgatgggaaattgaatatctatatgaaaaaaatgaaactggatccttatcacaaaccatacacaaaataaactcaatatgaattaaatatttaaatgtaagacctgaaaccataaatcttagagaagaaaatataagattaaaaactccataatattgatttggcaataatttttttaagctaacccccaaagcaaaggtaacaagagcaaaaataaataattgggactatatcaatcaaaaaagtttgcttcactgtaaaggaaaccatcaagaaaatgaaaagccatcctagaggatgagataatatatgtgtaagccatatatgtgataaagggttaatattcaaaaaatatgaggaactcatacaacttaaaaacaaaaaagaaataatctgattttttaaaaatgaccaaaaaacctgagttgccattcttccacggaaaacttaccaacgatgagcatgactataaaaaggtttttttgttgcctttttttttttttttttgagacagagtcttgctctgtcacccaggctggagtgcagtggcgctacctaggctcgctgcaagctccgcctcctgggttcacgccattctcctgcctcagcctccgaagtagctgggactacaggcacctgccaccacgcctggctaattttgtttttttttttttggatttttagtagagacgagctttcaccgtgttagccaggatggtctcatctcctgaccttgtggtctgcccgcctcagcctcccaaagtgctgggattacaggcatgagccatcacgcctggtcaatataaaatgcaaatctaaactacaatgatatatcaccttacatctgttaggatgactatcaacaaaaaatcaaaagataagcattggtgaaaatgtagtgaaaacagatctcttatacatcatggatggaaatgtaaattggtatagtcattatgaaaaacagcatggatagaggtctcccaaataattaaaatagaaataccatataatccagtgattttagttctgtgtatatatctaaaagagagaaaaattactatttccaagagatataggcattcccatgatcgttgcaacattatttgcaatagctaagatatggaaaacacccaaatgtcagttgatggataaataaataaagaaaatggggtgtttgtatgtctgtgtgtgcatgtatgtgtgcatgcagtggaatattatgcaaccttacaagagaaggaaactctgctatttgtggtacaatagatgaacctgatggactttatgctctgagaattaatccagacacagaaagacaaatattgcatgtttccacttatatgtgaaatcttaagaacctgaagtaatagaaacataaagtaaataggtgattttcaggggttagaggtgggggaaatagaaaaatattggtcaaatttgctaacagagtaaatcttaagttatctcattccccccatataggtaactatgtgaggtgatggatatattaattagcttgattgtggtaataattttacaatgtacacatgtatcaaaacaccacattgtataccttgaataaatgaaatttgtatttgttcattataccttaacaaagctggaaaaaatatttaaagaattattcaagcttctgtaggacaatcttcctttctactgttatttgcttgtggtaaaaaatttatttttacaaattttaataatagtgactgaaatatcacacttaaaatctaataatatttaccatttggaattacwaatttgtttatattagtatttgcagagtaaacacatgaataatataaatatatgtagtgtaatataacttcaaacaatcattgatatgtttaaggattttcctagcattttttactttaaaaacccttcaaaataattttgaaagaagaaaacgcagttgaaaaactattaccttatgtcaagacctattataaagccatagtaatcaatacagcagagtatccttgtaatgaaagacattcagatgaatgaaacagaaaatagagttcagaaatagacccatgcatataagggcaaatgctttttcaccaaggtaccaagacaatttaatttaaatggtaatattttcaacaaaatgtgccaaaataattgcattaaaaatgaatcttgatcctaaacatacatcagctacaaaacttaacttgaactgagttattgagctaaaaactatcaaaagtgtagaagaaacgatagtaaaattttttgggatcttaggtttggcaaagatttcttaaacagaacaaaattaagcacaaattataaaacaaaagatcaatatattggagttcatcaaaattaaatgatttgctcttgaaaacacagtgatgtaaatgagaaaatggcaaaacatgtatttagcaaaatacttcatatcaagaatctacaaaaaatcttagaagtcagtaataataagtcaagaattagaaatgagtgaaaaatttaaacaaacactagggatcaaaggatatgtgtgtgtgtgtgtgtatatatatatgaatggtaaataagtgtataaaatatgtttagtatcattagtcatcagaaaagtkcaaattaaaattttaatatgataatatatcacactcacaaggcggctaaaaagtaaaaaatgacaaccacaagtgttggtgagaatgtagtgcaactagaaatttcatacactgctgttgggaatataaattgctaaaacasttttaaaactattttagtagctatgtacaaaattaaacatacatctaccataaaacccaatcttctagatgtttttctaaaatataataaagcttttgtttatacaaagacttgtattaaataattataaaattacacttgtaattataaaaacgtgaagccacacaaatgtccatcaacagagaaataatcaataaattttcgtagacccatgcagtgggattctaatgagcaattaaagggcacatattatagatacattaaacaacatggataaatctaaaaaacaattttgtggagtgaaaaaatctatatttggccagatctgtaatcccagctctttgttagggcaaggcgggtggatcatctgaggtcaggagtttgagaacagcctggccatcatggtgaaaccctgtctctactaaaaatacaaaaattagctgggcatggtggtgcgttcctgtaatcccagctactcaggagtctgaggcaggagaaccacttgaacccaggaggcggaggttgcagtgagcagagactgtgccattgcactctagcmtgggcaacagagcgagactctgtctcaaaaaaaaaaaaaaaaaaaaaaagaaaaaaataagaaaaaatctatatttatacagaattccagaaaatcaaaacgaatataaagtgaaacaaatcagattaattgttgccagggatgggaggtggaatatacggaacatgaaaaaaattgtgggtggttatgaatatatttgttatcttgatgtgtttaccttaaagtaaatcactctgagttcaatgtgaaagataagtttaaaggtaatgagttaggaagcaggaatattagttatgagattaattcataattaagatgagaaataacaaaggcttaactaaggcattgctggtgatgttgcaagaaagaaattagaataaaatatggaaattaggaaacatcaatttcattaaatgagtatatrtggatgctgaaagagaagaattaagtatsacatctgtatttattgtttacgtgacttkgtgtcatcaactgagtcaaataatataggatatgacattttaacttattggaaatggaatatatatatatatacttttctttactcctsctactaaatgcaactaaaaatctcaggcattgtatctaaaacaaacataaaaagactcctaaaggtgaagagaaggtggcagaccagctcggactctcaggacctgagtaatgacacattggtgagtatactggtgtgttgttttgcctcatatattctaacttggaactgaataaactgaaaactcagatatgtgcttcaaaacacacttgaaataaatgaaactataaaatttctctgcaaagatagggaagataattatatcaataattgtattattagattaattgttataagtgagagaaggtaaagacattcacccaatataaaataaattatttgaataaccctataatttaagagttaattatattcatgaattaaaaattgttccccaaggaaatctccaaactcagatagtgtcaatggagaattataccaaaggtttaaaaaagaaataacaccaaattcaagtctctttcagaaaatggaagagaacactttctaactaattgtatgaaggtagtattactctgwtaacaaatctaaataaagatagtctaatgaggaaatctcagactaatagctctaattaatttggatttaaaacttctaacacaatattagtaaatacaatttagcaatatattaaaataattatacactatgaccaagtggggtttattccaaagatacaaggctggttcattactcaaaatcaacaatttattccctatatattaatagactaagaaataaaattatatgaccatattaatcaatgcagaaggaacatttgacaaaattctacattcattcataataaaaactctcagaaaaatcagaatataggggagctttctttatttgaaaaatagctctaagaatactacagctcacatcacacataatggtaaaagtgtgagagcttttcccctaaaattargaaacagrcaaaaatttttattctcaccactcttaattacaatgctggaagttccagacaatgcagttagacaagaaaagtaaataaaattctgatcagaaaggaagaaataaaattccttctagttgaagttgacatgattgtctatagaaaatcgcaaggagtgtacaaaaacctcctagaactaataagttatttcatcaagtttgcaagatagaagatcagattacaaaatttagatgtatgtctatatgctaggaatgaacatgtggacattgaaattaaaagtacaataccacttagagtcactcaaaaattaaaatacttagttgtaaatataacaaaacatgcactggacctgtttactgaaaactacacaatgctgatgaaataaatcaagsgttatctaaataaataaagagatatgccacattcacgattggaagattgaacatagtaaagatgttaattcctccaaattaatatacaaatttaacacaattcttgtaaaaacttttgcaagattttttataacaacaggtgataaaaagtaaataaattataacatttataagtgaaggcaaagaaaatagaatagcttattgtagtaattatttaacaacaaatacatatatctatcatcacattatacaatttatgtatatacaattgtatctgtctattatacctaaataaatctggaaaaaagaaaagaagaataaaacatgaagaatctttctacccaattgtattacattatattgctcttggaatcaagactgtgtggtattggaggaaggacagaaacatagataaatggaaccaaacacaaaacccagaatacacatatagatatgccaaattgatattttataaagatgtaaaagcaattcaatggagaaaagagtcttttaaacacatggttttggagcaattagaaatgtataggtcaacaaattaaaatactgaaatactaaacatacttaaacatacttaaaatactaaacataaaccccactcctagaaattaatgcaaactggattacagtcttaaatgtaaaactataatatttcagaaaaaaataggagaaaatttttagaatctagtgttgacaaagagttcttagaattggcattgaaaacatgatatataaaaggaaaaactgatcaattgtaccagaccaacatgaaaaacttttgttttgtgaacaaatctgtaaaaaagataaaaatacaagctacagattccacatatctggcaaaggactggtttctagattatatacagaaatcttaaaataaacaatcccattaaaaagtgggcaaaagacatgaacagacacttttcaaaagaagacgcatatgcggccaacaagcrtattaaaaaaagctcaatatcattgatcattagagaaatgcaaatcaaaaccacaatgagataccatgttgcatcagtcaaactggctataattataaagtcaaaaaataacagatgatggtgagtttgcagagaaaaaggaatgcttatacactggtggaggtagtgtaaattagctcaaccattgtggaagacagtgtggtgattgctcaaaaacctaaaaacagcaataccattccactcagccatcccattactgggtatatacccaaaagtacataaatcattctatcataaacacgcatgcacacatgtgttcattgcaggactattcacaatagcaaagacatggaatcaaaccaaatacccaccaatggtagactggataaagaaaatgtggaattaggagtggccaagatggccatctagaagttgctaatgtgtgtgcctctcacggagaggaaccaaaggggcaggtaaatayagcaccttcaattaaaatattcaggtactcgcattgggactattcaaacaacttgatccatggagaacagagaaaagcaaggcaggacgatggcccactcgggagtgacacagagccaagggaamctctctcacccagggaagtggtgagtgaacatgtgaccacaggaaaccacacttcttctatggagctttgcaaactttgggtcaggtggtccccttgtgaacccactccacgtgggccttcagtctgacacagagagctacatggagtcttggcaaagcatccactcaggcatgcacgagactcaggagctttagatactccagctttctgggcttcctggcagaagtaactgcaaccccaggtggttagacccctgtacatacccctaagaaagaagttgaatccagggggccaagctgcaatggtctgtgaaccccacttccgttgcacctcacaggataagacccactggcttaggattccagccagttacaggtagcagagttgtgtctctctgtgatggagttcctaggggaaggggtgggctactaactctgctgtttgggtgacttagccatatggccttcaggctttggagagtccaaaccaaacgggggcagaagagatcccccagcacagcacagctgctttaccaaaacatggccagattgcttctttaattgggtctcaaatcccctttctcmtcacttggggggtaactcccaaccaaggcctgcagccccctctgccagtgttctctggccagtagagattttaaaattccatgggaaagagctcccagagggaggagtggaccattatctttgttgtttggataacttagccattttatcctttgggctttggagagcccaagccaacctggggtggaagtggtacaccagcacagcacactgccctatgaaaaagtggccatactgcttttttacgtggttccctgatcctgtccttcatcacagtgtggagcctcccaaccaggatctccagctacttccactggtgttctctggctgacagaggtttcagacctccctgggatggagctcccaggggtaggggtgggccgccatctttgctgtttgagcaaattagctatttcagccttcaagcttcagagtgtttgaggtgactgggggctgatgtggactcacaatacagctgctctatgaaaacatggccagactacttttttaaccaactccgtgatcccattcctcctgactgaacaagacctcccaacaggggtctttagccacctcctacaggtgtgttcgggctggcaacaggcctctgcctccctgggatgaagctctgagagggaggagcaggctgctatctttgttgtttggcagccttaactggtgatacttccaggcattggaaaacctgagacaactagggactggagtggatgctcagcatacccagcgaccctatggaaaagtgaccagactgctacatgagtgcccattcccatatctcctcaccaggcaggtcctccatgcctgggcctacagccactctctgccagagctgtcaagcctctctggacggagccgccaggggcaactgaaagcctctctgccactgcctttgcagtaggcctctccttgttactcttgaactataaaaagagcaaagaccttaagtgcctatccacamctttaacaactggtagttgacccaaggagagtaggcctgtctatccccatgggttccacataccccacattgctcatcactagacagggaatccctggctggggcccagagcacagaccatccatcctgggatgattgcactgagtgactgctgacccacatctctctgggatggaggctccaggagacaagcaaagtggtggaacagcaagccagatgatgtggagcccagggggtttagtgcaagagcatctgtcgtggagcagggccagagatggtcattcctctaggctcaacttgctcccacaagaggctttagccctagggaaaccattggacctgatctctgcagggcagccttgcacatcagatggggctagtcccacctgagcactccttggtctgctggcctcctggggccccatcctggccatgcctgcttataagacagtctcaggtgcsctgcgagcccacaccatagcttctgcaccagtggaccatgcctgycccatggaaagctccagcaaggtggcccctacaggtgtgcaccagcctgcacattcccttgccatagtgcagcttctcatgagcccatggcaaatccccaagtcgtttttctggtgcatgtctgcatggcaggttttgctttccttgccccttcagcatgcaggagtgcactacttcccccatcccagcctactgctattgcagacttagccttggctggcacagagccagtaagccctgcctctgccagtgctctgcttttttgttaatgctgcacagagaacagggaattcttttacaacctgggcaatcacgcatgcttgtggggcacagaataagcacccaggcctgcactggccagcattccaccacaaaccaggaccatctccastgcaacagtgcacacagtctctagcagggtactaccataaccccaacccttggctgccttgcctccaccactatggtgaatgcccacagggaggcaggtaccccctgcatccagtagcactttgctgcagctgacacacctcagttcccccagtgcagtagactccaaacctcaaggagccagagaacaaagggcccaatacaagtcctgcagatttacagcacgcagcccagaagttcagagatgaaggttggatcccctaaaatcttccagaaacaaaaccagttggctgaatccaccttatatcacaatcaaacactcatggttatcaaataggataaaagaaaaaaaattaaaatgtcagcaacatcaaagatcaaaggtagataagcccacaaaaatgagattcagtgcacaaatgctaaaaactcaaaaagccagaataccttctagcctccaaatgaccacattcactcttcagcaaggattcagaactgagctgaggctgagatggctgaaatgacaagtacaattcagaatattgataggagcaaagttcactgagctataggagtacactgtaactcaatgcgaggaatcaaaaattatgataaaaaattacagaagctgacagacaaaatagccagaatagagacgaacataaccaacctgatagagctgaaaaacacactataaaaatttcataatgcaatcacaagtattaacagcagaatagaccaagtggagaaaaaaatcttagagcatgaagactggctttctaaaataaggcaggcagacaagaatagataaaaaaagaattaaaaggagtatataaccccccmaaaaaaatgagattatgtaaagagaccaaatctatgactgattggtgtacctgaaagagataaggagaatgggaccaacttggaaaacatatttcaggatatcatccatgagaacttccctaatccagctagagaggataacattcaaattcaggaaatgcagagaaccccagtaacatgctccacagaaagaccatccccaagacacatactcatcacgttctccaaggttgaaatgaaagaaaaaatgttaaagggaggtagagagaaggaccaggtaaactacaatgggaagcccatcagtgttaacagtggacctctaactggaaaccctgaaaataaaagattgggtgtcaatattcaatatttttaaggaaaagaaattccaactcagaatttcttttctcactaaatatggaaagaaaagaccattacccaccactacaaaaacacactgaagtacacaaaccagtgacattataaagcaaccacataaaaaagtctgcaaaataaccagctaacaagatgatgacaggatcaaatccacacatatcaatactgattttaaatgtaaatgggctaaatgctccaattaaaagacagtgtggcaagctgaataaagaatcaagacccatcagtatgctgtcttcaagagccctatctcatatgtaatgtcacacataggctcaaataaaaggaggaaaatctatcaagaaaatgaaaaacagaaaaagaagggattgaaatcttagttcttgacaaagtagaactgacaagcatcaaaaaggacacagaaaaacgtcaaataatggtgaaagactcaattcaacaagaagatgtaactattctaaatatatgcacccaacacaggagcatctcgatttataaggcaagttcatagagaccttcaaagagtcttagactaccacacaataatagtgggatattttaacaccccattgacaatattagacagattattgaggcagaaaattaacaaatatattaatgacctgaactcagcactggacaatatgggcctgatagatatctacagaactctccaccaaaaaaataacaaaatatacatttttctcaccaccacatgggacatactctaaaaccaactgtataattagatgtaaacctttcataagcaaattcaagagaactgaaatcataacaaatagtctctaggactatggtgcaatgaaactagaaatcaagactaagaagttcactcaaaaccatataattatatggatattgaataatctgctcctgaatgattttggggtaaaaaatgaaattaagggagaaatcagtaagttatttgaaactaatgagaacaaaaatacaatataccagaatctctgagacacagctaaggcagtgttaagagagaaatttatagcactaaatgcccacagaaaaaagttagaaagatctcaagttaacaacctaacttcacaattaaaagaatcagagaaccaagagcaaaccaaccccaaagctagtagaagacaaataaccaaatcagagctgaactgaagaagagataaaggcacaaaaaaacattcaaaaggtcaacaaatccaggagctgcttttaaaaaaataataaaataaatagaattctagatagactaatgaagaagaaaagagagaatatttaaataaacacaatcagaaactacaaggggatattaccactgaccccgcagaaataaaattatcaatgaatgttatcaacacatttatgcatataaattagaaaatctagaggaaatgaccaaattcctggacaaatacaccctcgcaagactgagccaggaagaaattgaattcctgaacagaccaataatgagctctgaaatggaggcagtaataaatttcctatcaaccaataaaagcccaagaccagatggattcatggctgaattctaccaaatgtacaaagaagagctggtaccattcctattgaaattactttaaaaaattgaggagaatggacgcctccttaattcattctatgaggycagcatcatcctgatagcaaaacctggcagcaatgcaacaaaaaaagaaaacttcaggccaatatccttgatgaacactgatgcaaaaatcctcatcaaaataccagcaaactgaattcaacagcacattgaaaagcttattcagataattgctggaggtgggggattcaagatggcctaataggaaaaacacctgtgtgcagttcccagcgagatcgatgcagaaggtgggtgatttctgcatttccaactgacgtacccggttcatctcaatgggactggttgcacagtgggtgcagcccacggagggtgagctgaagtcaggtgggttgttgcctcacctgggaagtgcaaggggtyggggaattttctcccctacacaagagaacccatgagggtctaagcctgaggaactccagcacagatactgagcttgtccctcagtcttcacaacctgcaaaccaggagatcccctctggtgcctaccccaccaaggccctgggtttcaagcacaaaactgggtggccagttgggcagtcactgaactagctgcaggagctctttttttcccataccccagtggtgcatagaatgccaatgagacagaaccgttcactccccttgaaatggcagctgaagccagggagcaaagtggtctggcttggtgagtcccatccacatggagcccaggaaactaaaatccagtggcttgaaattctcacagtcagcacagcagcaatctgaggtccacctgggacattcaagcttggtggagggaggggcatctgccattgctgaggcttgaataagcggttttatgatcacagtgtaaacaaagcttctgggaagttcgaactgggcagagcccactgtagctcagcaaggatgctgtggccagactgccagatttctcctctctggacagggcatatctgtaaaaaaggtagcagccccagtcaggggcttatagcagacataaaagttcctgcctgatggctctgaagagtacagtggacctcccagcacagtgttcgtgctttgctaagggtcagacrgcctccacaagtgagtccctgacccccgtgtgtactgactaggagacacctccaagtaggggccaacagacatctcttacaggagagctctggctggcatctggaaggtgtacctctgggtcaaaacttccagaggaaagaacagacagcaatctttgctgctctgcagcctccactggtgatacccagggaaacagggtcgggagtggacctccagcaaactccagctgactggcagcagaggggcctgactgttagaaggaaaataaacaaacagaaaggaatagcacatccactcaaatgccccatctgaagttcaccaacatcaaagaccaaaggtagataaatccacaaagataggaaagaaaaaaaaaagtgctaaaaggatataaataccaaaatccagaatgcctctcttcctctgaaggatcacaactcttcaccagcaagggaacaaaactggacagagaatgcatttgatgaactgacagaagtagccttcagaaggtgggtaataacaaactcccctgagctaaaggagcatgttctaacccaatgcaaggaagctaagaaccttgaaaaaaggttagccgaattgctaactagaataactaatgtagagaagaacatatatgatctgatggagctgaaaaacacagcatgagaacgtgaagaatatacaagtatcaatagctgaatagatcaagcagaagaaaggatatcagtgattgaagaccaacttaatgaaataaagagagaagacaagatcagagaaaaaaaaaaagtataaaaagaaagaacaaacactccaagaaatctgggactatgtgaaaagaccaaacctgtgtttgattggtgtatctgaaagtgatggggagaatggaaccaagttggaaaacactcttcaggatattatccaggagaacttccccaacctagaaagacaggacaacattcaaattcaggaaatgcagagaacaccacaaagatacttctagagaagagcaaccccaagacacataattgtcagattcaccaaggttgaaatgaagggaaaaatgttaagggcagccagagaaaaaagtcaggttacccacaaagggaagccaatcagactaacagcagatgtctctgcagaaaccctacaagtcagragagagtgggtgccaatatttggtgttctcaaagaaaagaattttcaaaccagaatttcatatctagccaaactaagcttcataagtgaagaagaaataaaatcctttacaggcaagcaaatgctgagggattttgtcaccgctagatctgccttacagagctcctgaagtgagcactaaacatggaaaggaaaaacagttaccagccaatacaaaaacataccaaattgtaaagaacatcaacactatgaagaaaccgcattaactaaccaacatccagcaaaacaaccagctagaatcataatgacagaatcaaattcacacattacaatattaaccgtaaatggaaacaggccaaatgccccaattaaaagacacagactggcaaattggataaaaagtcaagacacctcagtgtgctgtattcagaagatctacctcawgtgcaaagacacacataggctcaaaataaagggatggagggatacttatcaagtgaatggaaagcaaaaaagaacgtgagttgcagtcctaatctctgataaaacagactttaatccaacaaagatcaaaagagacaaagaagggcattacattttggtgaagggatcaatgcagcaatgagagctaactatcctaaatatatatgcacccaatacaggagcacacatattaataaagcaagtttttagagacctagaaagacttagactcccacacaataataatgggagaatttcacactccactgtcaatattagacagttcgaggagacagaaaattaacagtgatattcaagacttgaactcagctctggagcaagccgacctaatagacttctacagaattctccaccccaaatcaacagaatatatattcctctcagcaccacatagcacttattttaaaattgaccacataattggaagtaaaacacttctcagcaaatgtacaagaatggaaatcataacaaactgtatctcagaccagagtgcaatcaaattagaactcaggataaagaaactcactgaaaacctcacaactacatggaaactgaacaacctgcttctgaatgactactgggtaaataatgaaataaaggtaggaataaagacgttctttgaaaccagtaagaataaagacacaacgtaccagaatctctggacacatttaaggcagtgtttagagggaaatttatagcactaaatgcacacaagagaaagcaggaaaaatctaaaattgatgccctaacatcaaaattaaaagaactagagaagcagaagcaaacgaattcaaaagctagcagaagacatgaaataactaagagcagagcagaactgaaggagatagaggcacaaacaaccctccaaaaaatcaatgaattcaggagttgtttttttagaaaaatcaacaaaatagatagactgctagccagactaatacagaagaaaagagagaagaatcaagtagacaaaataaaaaatgatataggggatatcaccactgatcccacagaaataaaaactaccatcagagaatacaataaatgcctctagcaaataaactagaaaatctagaagaaatggataaatccctggacacatacaccctcacaagtctaagtcagaaagaagttgaatccctgaatagaccaataacaagttctgaaattgaagcagtaattaatagcctactaaccaaaaaagtccaggaccagacagattcacagccgaattctaccagaggaacaaagaggagctgctaccattccttctgaaactattccaatcaatagaaaaagagggcatcctccctcatttcatgaggccagaatcattctgatatcaaaacctggcagagacacaacaaaaagagaaaamttcagaccaatattcctgataaatatcgatgtgacaatgctcaataaaatactagcaaactgaatccagcagcacatcaaaaagattatccactatgatcaagttggcttcatacctgggatgcagagctggttcaacatatgcaaatcaataaacgcaatccatcacaaaaacagaacaaatgagaaaaaccacatgattatctcaatagacacagaaaaggcctttgataaaaatcaacgcctcttcatgctaaaagctctcaataaactaggtatcgatggaacatatctcaaaataataagagctatttatgacaaacccacagccaatatcatactgaatgggaaaaaactggaagcatttcctttgaaaactggcacaagacaaggatgcctctctcatcactcctattcaacatagtattggaagttctggccagggtaatcaggcaggagaaagcaataaagtgtattcagatatgaagagagtaagtcaaattgtctgtgtttgcagattacatgattgaatatttagaaaaccccatcatctcagcccaaaatctccttaagctgataagcaacttcagcaaagtctcaggacacaaaatcaatgtgcaaaaatcacaggcattcttatacaccaataacagacaaacagagagcaaaatcatgagtgaagtcccattcacaattactactaagagaacaaaatacctaggaattcaacttacaaggtatgtgaaggacctcttcaaggagaactacaaaccactgctcaatgaaataaaagaggagagaaacaaacttttacatttatctcttcattgctgaacatatttgtcaagatttcaaaatgtccagatgtggaaagcaaggtggaaaggcctgagccaaggctaagacttgctcttctagggttgggctccagttccccgtgggtcaagtagctcctgacagaagcaaaaaacatggaaaaagacaaccagtaccagccactgcaaaaacacgccaaattgtaaagaccatcgatgctaggaagaaactgaatcaattaacagttaaaataaccagctgacatcataacgagaggatcraattcacacataacaatattgaccttaaatgtaaatgggcttaaagccccaattaaaagacaaagactggcaaattggatagagtcgagacctgctagtgtgctgtattcaggagaaccatctcacgtgcagggacacagataggctcaaaataaagggatggaggaagatctaccaagtaaaaggaaagccaaaaaaagaagcggttgcaatgctagtctctgataaaacagactttaaaccaacaaagatcaaaagagacaaagaaggccattacataatggtaaagggatcaaatcaacaagaagatctaactatcctaaatatctatgcacccaatacaggagcacccagattcataaagcaagtccttagatacctacaaagagacttagactcccacacaataataatgggagactttaacaccccactgtccatatcagacagatcaatgagacagaaggttaacaagaacatccaggaattgaactcacctctgcacccagtggacctaatagacatctacagaactctccaccccaaatcaacagaatatacattctactcagcaccacatcacacttattctaaaaatgaccacataattggaagtaaagcactccttagcaaatgtaaaataacagaaatcataacaatctgtctctcagaccacagtgccatcaagttagaattcgggattaagaaactcactcaaaaccacacaactacatggaaactgaacaacctgctcctgaatgactactgagtaaataatgaaatgaaggcagaaataaagatgttctctgaaaccaacaagaacaaagactcaacataccagaatctttgtgacacatttaaagcagcgtgtagagggaaatttatagcactaaatgcccacaagagaaagcagaaaaaatctaaaatcagcaccctaacaccacagttgaaataactagagaagcaagagcaaacaaattcaaaagctacccgaagggaagaaataactaagatcagagcagaactgaaggaaatagagacacaaaaaacccttcaaaaaaatcaatgaatccaggagctgggtttatgaaaagatcaacaaaattgacagactgctagcaagactaatatagaagaaaaaagagaagaatcaaatagacacaataaaaaataataaaggggatatcaccaccaatcccacagaaatacaaactacctttagagaatactataagcaccggtacacaaataaagtagaaaatctagaagaaatggatgaattcctgaacacatataccctcccaagacaaaaccaggaaaaagttcaatctctgaatagactaataacaggctctgaaactgaggcaataattaatagtttaccaaccaaaaaaagtccaggatcggacgtattcacagccgaattctaccagaggtacaaagaggagctggtaccattccttctgaaactattccaatcaatagaaaaagagaaaatcctccctgtctcattttatatggccagcatcagcctgataccaaaacctggcagagacacaacaaaaaaagagaattttagaccaatattcctgatgaacatcattgggaatatcctcagtaaaatactggcaaaccgattccagcagcacatcaaaaagcttatccaccacgatcaagttggcttcatccctgggacgcaaggctggttcaacatatgcaaatcaataaatgtgatccatcacataaacacgaccaatgagaaaaaccacatgattatctcaatagttgcagaaatggccttcaacaaaattcaacagccttcatgctaaaactctcaataaactaggtattgatggaatgtatctcaaaataataggatctatttatgacaaacccacagccaatatcatactgaatgggcaaacctggaagcattccctttgtaaaccagcacaatacaaggatgccctctctcaccactcctattcaacatagtgttggaagttctggctagggcaatcaggcaagagaaagaaataaagggtattcaattaggaaaagaggaagtcaaattgtctgtgcttgcagatgatatgattgtatatttagaaaaccccattgtctcagcccaaaatctccttaagctgataagcaacttcagcaaaatctcaggatacaaaatcagtgtgtaaaaatcacaagcattcctatacaccaagaacagacaaacacagaaacaaatcaagagtgaactcccattcacaattgctacaaagagaataaaatacctagcaatccaacttacaagggaggtgaaggacctcttcaaggagaactacaaaccactgctcaaggaagtaaaaccggagcaaaacaaatggaagaacattccgtgctcatggataggaagcatcaatatcgtgaaaatggccatactrcacaagatgatttatagatttaatgccatccctatcaagctcccaatgactttcttcacagaattggaaaaaaactacttagtttcctatggaaccaaaaaagagccctcattgccatgacaatcctaagcaaaaagagcaaagctggaggcatcacgctacctgatttcaaactatactacaaggctagagcatccaaaacagcatggtactggtaacaaagaagatatatggaccaatggaacagaacagaacagaggcctcagaaataacaccacacatctacggccatctgatctttgacaaacctgacaataacaagaaatggggaaaggattccctatttaataaatggtgttgggaaaactgtctagccatatgtagaaagctgaaactggatcccttccttacaccttatagaagaactaattcaagatggattaaagatttaaatgctagacctaaaaccataaaaaccctagaagaaaaaacctaggcaataccattcaggatagagacatgggcaaggacttcatgactaaaacaccaaaagcaatggcaacaaaagccaaaattgacaaattgcatctaataaaactaaagagtttctgcacagtaaaataataataataacaataaaacaaaaaaaaacctatcatcagaatgaactggcaacctacagaatgggagaaaaatttttgcaatctatccacctgacaaagggctaattgaatgtacaaagaagttaaacaaatttacaagaaaaaaacaaaaaaacacattaaaatttgggcaaagtataagaacagatacttctcaaaagtagacatttatgcagctaagaggcatatgaaaaaatgctcatcatcactggtcattagagaaatgcaaatcaaaaccacaatgagataccatctcacgccagatagaataacgatcattaaaacgtcgggaaacaacagatgctggagagatgtggaaaaataggaatgcttttacactgttaggggagtgtgaattagttcaaccattgtggaagacaatgtggcaattcctgaaggatctagaactagaattgccatttgtcccagcaatcccattactgggtatatacccaaaggattataaatcattctatgataaagaaacatgaacacgtatgtttattgtggcactattcacaatagcaaagacttggaaccaaccaaaatgtcatcaatgatagactggattaagaaaatgtggcacatatacaccatggaatactatgcagccataaaaaaggatgagttcatgtcctttgcagggacatggatgaagccagaaaccataattctcagcaaactatcacaagagcagaaaaccaaacactgcgtgttctcactcataagtgggagttgaacaatgagaacacatggacacagggaagggaacatcacacactggtgcctgttggggactgggggactaggtgagggataacattaggagaaatacctaatgtaggtgacgggttgatgggtgcagcaaaccaccaaggcacgtgtatacctatgtaacaaaacacgttctgcacatgtaaccccaaacttaaaggataataataataaaaaagaaccacaacaaaaaaagaaaagcttatttatcataatcaagtaggctttaatgctgggatgagagtttggttcaacatatgcaaatcaataaatatgattcatcacataaacagaactaaagacaaaaaacacgtwattatctcaatagatggagaacaggctttcagtacaattaaacattccttcatgttaaaagttctcaacaaacaagattttgaaggaacatacttcaaaataatgagtcacttatgacaaactcacagccaacatcatactgaatgggcaaaagctggaagcatttcccatgagagctggcacaagacattgattccctctctgaccactcctattttacatagtattgggagttctagctaggtcaatcaggcaagagaataaaatgacagcatccgaatagatagcaaggaagttaatctataaaatattgctgaagaaattaaagatagctaaataattgagggcttatgtatgcatgtgtatatgtatatctcatattcatgattggaagaccccactttgaaaaaatgtcagctgtccccaaattggtctatagattcaatggaatcctaataaaaatctaagcagatctttttttttctgtactctgattataacatttacacggatatgctaagaatctgaaatatcaaaaaacagtctttaatagaagaaacaaaacgactgggctttcacttttttcaccttttgactttaattaaaaaaccttaatatcaagcaaaaaaaatccaattagaaaatgaacagaagacatgaaaagatttttcaccaaaatgaatatatagatgtcatataagcttatgaaactgttttaggccctagggaaatgcaaatttaaactatgttaagctatcactttacacctattagaatggctaaaatttaaaaaaaaaatggtgactgtaagaaatgctgctgagcatgcagtgaaactggatgacatatattgctggtggcataaaatggcatagccactttacaagattatttggaagcttcaaaaaaaaaaaaacactaaaaatgcatctaccatatggcccagcaattgcactcttaggtatttatcttagagaaattaatacctttgttcacacaaaaagttgtacatgaatgtttacagcagctttattcaataataaccaaaagatgtaaatgaataaaaaccttacagatatccttcaatagtgaaaaggttaaacaaaccatggcacatccatgtaatggaatactaggtaacaatgaaaaataaatgattattgatacacatacaacctggctgaatctccagtgattgtgcagagtgaaagaaacaaaccccaattggttacaatactgcacgatttgttttatttgacaatcttgaaatgaaatcatacaaatggagaacagattgggggtagctatggaataatgaggggattgggcagtggtgtggacataaaaggacaacatgagagatctgtgttgtgaagaaaatgttctatattaactacagtattctcattatgacattgtacttatttggaggatgttaccattgggggaaaatgagtaaagggcacctggaatctctctgtattatttcttacagcttcttgtaaatctacaattatcttaaaataagaagtttaattaaaataatgtatgcaaaataagcttatttggtggtggacatggtcaaaagtttatcatttcctatttacttacctattgtgttacacttattaagacacacccacttttgcctactttaagcacaagtttatagttactaagacatacatttgtttttatattagttagtatttgggaatgggtaayaagaaatttgatttacatagttgtatatgtgcatgtgtgcatcctcagatataagttcatgttttcattatgagtatatgtatttttatgtgttttttaaatgtttattttaggtttagtggtacatgtataggtttgatatattggtaaattgcatgtcatggaggtttggtgtgcagattattttgccatccaggtaatttgcatagtaccagtcaggtaattttttggtcctcagcctcctctctccctccaccttcaagtaggctgtggtgtctgtttttcccttctttgtggccatatgtcctcattgtttagcttccactcataagtgagaacatgcagtatttggttttctgttcctgtgatagttttcttaggataagggcctccagctccatccatgtttctccaaagggcattatctcattcctgtttatggctgtgtagtattccatggtgtatatgtaccacatttttgttatccagtctaatgttgatgggcatttcggttgattacatgtctttgttattgtgaatagggctgcaaagaacatacagatgcatgtatttttgtggtcgaacaatttatattcctttgtgtgtatacccagtaatgagattgcttggtcaaatggtaattcttctttcagttctttgagaaataaacaaaatgccttccacaatggttgaactaacttatatcgcctatagcagtgtataagctttcccttttctgtacaacctcaccagcatgtgttagttttttgacattttaataatagccattctgactatgtgagatggtatctcttcgtggttttgatttacatttctctgacgattagtgatgatgagcatttttttaatgttttttggccacttgtatgtcttcttttcagaagtgtctgtttatgtttcttgctcactttttaatggggttatttgtttattgcttgttaagtttcttagagattgtggatattagatctttgtttgatgtttgtgaatatttcccccattctgtaggttgtctgtttactccgttgatggtttcattctttctgtgtgggttgatgttccttcaactgtagtgtaatatgagtataatcagttgacttcttttctgaatgttttcagcagtctaagcatttttgcaggatctttatttgtagcttagttcttgtccttggtttcactgggggatatattaacagtattttcggtgttgaaatttggttgtaatccactagatggtgcttaaatgtaatggttaataggtacgctcttgcttagccatgtggctcgcctgtatttcctcatgattgccatcaaattttctgttactgttctgaaagtgtaggctcctctcccacwgaagtgctgtctgtagacctctgtttggcacttgcgagctgtacagcacaaccttgtggtgagctcatctttattttccttccccacttttgaggcagcaggggacaagaccttggcagtggctatggcagagggtctttcccgtgtcttttggtgctctaccctagagaaattcagagcggatatcaactggtgcaatcagtcaagggtggggcagctgcgtttttggcccaagccatgggaacctgcctggggatgggaaggggattgcggagggaacagaccagcctcttctccttatggtggctgtggctttctggaggtgtggttaaagcactgtgcgtctttgcttctttcccagtctgagggcagcaagggcactaccattgcagtggcaggggcagaaaggcttttggttgtctctgggacctccatctcagaaaaaaacacagagtcactgctactggggatgttcagccagggggtgaggcaactgtgctgttggcctgaggtggggaccccgcttggggaagagtsggggttcgagggataacagggaggagagagtgggctcttctttgtatggtgactgtgtcttgctagaaatgtgagtaaagccctcaggatcttcatttcttctccagcctgagggcagcaggggaagaaccactgcaatggcagtggcagaggggctgtcagttgcctctgggagcccctcccccagggaaatacaaagccactagcagagggaatgctcwgccaagggtgggacgtctgtgtagatccaggcttggggccctrcttggtgaagagtgtggggtgggagcctacatggaagagagactgggctcctctctgtatggtggctgcagcgtgctggaggctccagtgtagcaactcgaccttttgttttattccctggcctgaatgcagcagaacagtaccactgcagctgcaatggcagagaagctgtgggttgtctctgggatttcctcctcagaaacgcagagctgctaccgagtaaagtgtttatgtggaagcagagtgattgtgcttggggcccaggtcaagaggcactgctcagtgaagagcagcggaggtggggacacacgtgaaaacagtctggccgcttttcctttaaggtgactgcgctgtgctgtgggttcgcgtcagtccccaacttctatactacctccagagcctgatgagaacatgagcgtggaaaaacgtcagcttgcctgctccctctgggagctctgtcccagggaagtgtggagctgcttccagcctgagaactcaggcagggctggggtagccttgttagtgtcccaagctaatgggccttatcctgcggcgtgcccgggaagaaagcctgcaatctgggcatggtggtgggtgcttataataccagctacttggaaggctgaggcaggagaatcacttgaacccgggaggcaaaggttgyartgagccaagatggtgccactgcactccagtggcgctccagcctgggcgacagaatgagacaccatatcataacaaaacaaaacaacaacaacaacaacaacaacaacaaaacctggaatattaytcagcttttaaaaagcaggaaatttaacatytattttaaagataaatcttaatggtcttatgataagtgtaataagtccatcataaaaagtatgaatccacttatacgagttagctaaagtagttgcacttttaaaaagagaaaatagaatggcatttgtaaagggccagtcaatggggaaaacaggtagtcgattcatgtatagtatgtattcattttgcaagataaaaatgttctggtgatatgttgccaacaatggcaatatacttaacatggtctaactattaatataaaattaaaatatttaagattgtaaaaaaaaaacagaagctttacatccatatgtgatttaatcttcataacaccatatggcagctgttattctactttacagatgagaaaacacacctagggacattaagtgatttgttcaaggtcaaaaacataatgagtgctggatctaggatttggattcaggtctgtctggtcagagcccaatcagtgagcattctttgtacctcaggctcacatatttgtcatttacaacttaaataaagtaacaaaagttgggcaaagtaaatattttcattttgacaaaacctttctctggtaaggaagtttcactcagctaacaggttttgctcagaactgtaatggagcctagattatgacaacctgctttatcagctttctttactggatctgctagatgtgcctgtcatgattaacctgctttctaccaggtgcttgaattaggctagaagtgctgtgatgacactttcagtatcaacctaagttctgcaggtgaaaagacagtgacctggatgacgttgtcatttcacctacccaagaccttaaatgccaagctcgaatccctatcttcaacgctcattatctcataatcacataccttcagcctacaaacctgtattgacttctcatcaagccctatgtcaggctctggcaatacaaagaggaattagaatgaccctgttcttcgaggagtttatatctagatggggcatagacacaaaaacctaacacataacagagggttgtaagtgctatgattttgttaatctgtggagtgcagggttacaaaagagtggcatcacacccagttgtaagttcagggaagacttactggaggaggtggtacttgtcctgaactagatgaagaggttgggaaagcagatgcaaagataaggagggaagagagaactttcggatagttgtttgtcaggagcttagcatgtgagggatagaaggggttagggatgaagcatagagtttttcagacaccagtcatgagagtcgaatgctggacaaagtagatgggtcttgaatctgtggaaaatggagaattattgcggagttattggcaggggtgtaatattgtcagatttacatattagaaagaacactctataaataaaggcagagtgatcagctagattatttgtagaagttcatgtaaacctcagtgagatctgagccagactgagttgagaaggaagggctggattctgtcatgagaataagagaaatggaagaatctgaagtgattctagatttttggcatggctgactgggtggatgaaaattccatttgtagacctgtaggggcagcagtctgggggacaaaaggatgagttttggacttgttgagtttgaacgatctggaagacattcacatggatatgtcaaaaaaggcatttcaagtgtccagtttaggagacagatgggctggagatttgatgttcatcagtactacctgttagtgatcttataaggattaaataatatgcatatggaaaatatatatatacttgccatttagttgtttgttgagcatactgaatatttgyatacaaaggtatacttacaacacttttttcacaagcacagctgaaataaactataacaactaccacttatactatttaccataaattgtgctaaatgtttttacttattatctagtgtttatggtaaccctttgatataggagtagttattcccattttttttcttatgagtaaactgactaggagatatagtgtaggttggccagggctacacagtagcagaactggggaattccaaggccagtgttctttcttatgacgcattttctgtcttgggttacaacagcactaacgacaggtagcattgcacacaggcagctgctgggaagtctccgcccccatctctggctaggagccctgcaggtgatgataaacaagctcctgtggaattgtgggtagacactggacttgtaaacgaaaagcttcataagtccctctttgcttagtacttttctcgtcctttccccagggtgcacgtaaccctcaagcactaggaccgtgcggaatccaggctgcgatggcaccttcatttaccgcccgcattcagttgttcctcttgcgggcgctaggctttctcataggcttagtaggccgagcagctttagtcttagggggyccaaagtttgcctcaaagacccctcggccggtgactgaaccattgcttctgctttcggggatgcagctggccaagctgatccgacagagaaaggtgagaatgcaattcagaagaggctggagggacaggtcttttagcaggatccaggaagcttagtggtggcggtggttgtggtttcctttccattctctactagggcgacttaggagaggcatttattggggatgaagggagacttctgggtgttgtagtacgtttatttttaccaaggacatttactgtgggcatgggttggactattttggtaccgtcatagtccttcctatccatttgtcctatttgtgcataattactgtgtgtggggtaaagcaggtgtgaatttcaaactgattctcagctatggaaagtcagtctctctctttctctctccctctccctttctctctctctattcttccgtctctcacaggccccagatcaacctgctgcttaccattcaaccaattctttttaaaattgatttaaagtaaaagtagtacttggtctaggatagtaaaagctgcgtctaccatatatttattgcatagtatatgtgaaatactctgcctgggtacttaaacatattctatttcacggatgcagttatataggcaatattcatattttatgcataaggaaactgaagtaaaatgatttgcacaaaaattgttgaaagttctaaattaaaaaaattaagcagctcattcgttctctatagaattgtgcaggcaggactattcatctctgtcatataagtgattggttacctggagatcttgagctacagtctagtattgtttatttatactctgcttgttttcacctctctgctgtttcatttgtttttcgtcattgctttatttccagaatctacaatactacttaacaaagaataggcatgcagcaaatactatctcagtatgtgctcctgaatgtatgaattattaatatttgtattgtactcctggttacctttcaaagacatatcctgtcttcttgccgtaccccctccccagcctctacccactcatgcatgcttttctaccagttagggaggcaatgggatgtattcggttggtgcaaaagtaattgtgattttgtaattgagattttgacattacttttaatggcaaaaatcacaattacttttgcaccaacctaatagtagaaagatgatatatttcaaattttggactgtctgttcatggctctgtgaccttgtgccacaccaatagcagataatacatatcaagaacctggcacatagaagattgtgtaacataatgattagaaggatggactctagagtcagactccctgggttcagaaatcctagcttttctacgatctagctctgtgatcttaaaaacatttctttttttttttttttttttttttttttttgagacggagtctcgctctgtcgcctgggctggagtgcagtggtgcgatcttcgctcactgcaagctccgcctcccgggttgacgccattctcctgcctcagcctcccgagtagctgggactacaggcgcccgccaccatgcccggctaatatttcgtattttttagtagagacgggttttcatcgagttagccaggatggtcttgatctccggacctcgtgatccacccacctcggcctcccaaagtgctggaattacaggtgtgagccactgcgcccggccttaaaagcatttcttaactttttgkgtctctgatgtcctttaagaaaaatggatttgataatagaatctaccttttagagttattgtgatgaattaaatgaattcatatatgtaaaacttatagaatattgtctggcatactaatcctatataaatgttaactattactattattactatcatcaagtttttggtaactagccattttttattcatgcttgcccatgagatgagatgatctagatatagtttatctagatttataaaaatgttctgaaggggagaagtggagtggatacaaagttttatttatcccttagtttctgacwtttttaaacatggaaatattgttactgcaaaacaactaaatttcttaaacacctaccatgtgccacttgataaggcaaacattttacttagatttttgtaaattgaatcttcataatgacattttgaggtacatatgattatcatcatcttacagagaaggaaaataaagtttagagctttctaatagcttgtccaatgccacacagctagaaagtggtagagccaggtaaatcttactcaatttttgttggcactttatggaagagtatgcttcttgataacgagctctgattgaacagtcagtttcctgtgagtcagtgtctactgtcttttgcttgcttttgtgtccctatgattactcttctattattcagaattcaggctaccactatgtcttctgaacctccacagcctcagttggtatccaaggttgggccttgccaaaaatacatcaacttatggccaccatcatacatagcctggtcatttggatatttgattttgttgatgatccgaaagtcaatgaggttttgaaaccgtaagtcccaccctttattcatctcctttgttaggagacaagggtggaaagaggcttcattgcatgatcttttttactttcagatttttgaaacgtgtgctcatgttacctatttataataaatataatcaatactttagaaaattagaaaaaagtattttcagtttttagataagtaataaaaaataagtatgaagttgatctaaaggaacagatacgtaaatagttctgaattatgttacgtggtaaaaatataaggtactgaacaatgaatataatatgattccttttgtgtgaagaagggagagagagctgaagagaggggaraagggaataagggagagagggagggaaagagagagagagtgagaagctttcacttttcatttgtacttttctgtagtgaatggattttctaacgatgtacctagtcttcatttctcttacgacagcaaggttcatttggaataagcaaacacaaatatccaggctcagctatgtgactttggttaagtcacttaacctcagtgagcctcaatgacttcatctgtaaaatggggataacattacatgtgttgctaggaatatttaatgacataatatatataaagttcttggcatataataagtatttagcaaatggcaattatggtcatgttaacttctacctctaacccctgcttttttttttttttttctcacgtgctgcatgctacaaactcaattacggtagcagtggcagttgaagatctttggggttgtatacgttgatggagtgaccaggtactagacatcagcttgacaatccaggctcttaatgctagagctctgtatacactagactattgagttatggtggctgaaatctctgtctgtgcatgcatttaacaaacatttactgaaaacctactagacgcataattctaaaggacaagtagagttaacccaaaagaaaaagtacatgtaactttcttttataatttcataaatctcccctgtatctatggttgtaccttattttttcattcttaatactaaccatttttctgcacacactctttctccatcatgcttgttgcagtttatccatttgatagatatttaaaagttagttcatctttttatactggttttgttgttactgttcctattttatttctgttattaaattttatcttgatcttgttattctttaaaaaaattgctttatttttctattattttaagttgaataccttatatattgtcttactttttataaataaaagcatattaggacaattttagccacaatcaatatatttgataagaaatgatcctctttttgtgaatttcctgataatttgccattttagttttgtttacctcttagatccattggttatatggaagaatgtttttgaaataattaagccttctaaatatcactgtttaattttgggtttctaatatttctggatatgataatttgtcaaattgacttagaaattctctaaaaccatttgggatttaagatttgctttgtgtgacatgattattttttgttaatgattgatgaataaagaacatattcttgatggagtaaaaattctccctcactatgcatttgagcatgttggttgtattattaaattcttggatatatcctcactttttactccttggtctgtgagtctctgagggagctatattgtttactactgtacttatacatctggtcaacttctctttgtatttgtagtatatgcttcatgyatttgccagctttattaaaacagaaaagtatatgactgttacagcatcctcatgtatcataccattttaggtttcagttttaaaatttgctttctctaatattaatgataccacctctcctttcttattgtttgttttcacctagtatatgtttgcctaactctttgttttcaatctttcattgtctttttgttccagatgaatttcatataaacattgtatagctgagctttttttaaaaccaaatttaatgcttttgccctctggcaggggaattcagtccttcacacttattatgtaattggtttaatccttttcacttgatgtaatgtttataatttatcatacttgctttttcttttcctttccttcttttttctgtcttgatctgatttctttttaattatttttctctcctcattacttgggggttctgttttgctttgcaattttctaatgtttattgtctcatgtctaagaattaacattaaaactacaattgtatataataattaaattataatcctgtagcacccacccaggatgttttacttgtctcattcctgctcacatgcttaacttaagacctttggtttagtgttggtaaatttagcaaacaaaagtacaatatgcttagctaaatttaaatttaagataaataacaaatagatttcagtataatcatcctcatgcaattattgggacatacttatattaaaaattactctctattcatttgaaattcaaatttaacttgatttcctgtattttatctggaaaccctamctttatgcccttttatgtctccactctccaactcttggttttgcagagttgatgtatactgttaagtttcagtgtattactgaaacaatatctatttttttattgattatttactagaacaaaatatttgctagtttagtatatatacataatatctctgaactccaatttatatttaatttcagcagagtttattccttttatccctactcattgtttggaactttcttatactggtatattcctgacttcttaccttcaaagtagacatcttatacctccttagcttcatattttgcctcatgggggactrcactgtgtaattcactgaaagtgtctcaaaaaatgattaatgtacataggagtctttcaggaaatacttgttgaatgaattgtttagtgaataaatggctgcwgactaaagtattgtattttgcaggtgaaatgtatagatgttgttcaggcttatatcaacagaatcaaggacgtgaacccaatgatcaatggaattgtcaagtacaggtgagcatttccactctctcaaggagtcatttatggtggtttttgttctacttctgtggtcatgccaccttagcatatttcctagattcttctttctctttgtccttcccttgttctcactgggaacttctctgacttctaatttcagtattttgtcctttgttgagtgtttatgattatttgtctgcatcctcctcctattaactgcaagatccttgatggcaaggactaaattttgttgtttttgcatatccaacatccagaacaaggtctacagtttggtaggcatcattgaacatttactgaatagattaatatttggcagtgactctaataggagaacccccctacacatgcacacttttttgaatgtgtatttagcatagtagatagtattttatataggtatcatatacgttacttctgtgtctctattgctaagtaaacacttctcagcagctctgaggtattagagggccaaaaacttggattattttctttgtaatattctgtttaatgggtagtacagttcttcttagcacaccatgacatagggtgccatcgtgtagctctcagccattcatgtaccatctttaggatttttgtcttgtttgcacgtcagctttgttgttgttaatatacttattaaaattgagtcacttattctaacttaatcattttaaaatgaaactttatatcactacacatattgaaaacctatcatttaacatggatggttaatataaataaaatgaaaactagccaatatcatgaaattatagacatttaaaatattttaatgaaatataagtactgcatcaaatggatttgtatcataatagatactttatacatgttttctcatttgatcatctcaacagcatttcaaaaaatgtatgtgacaaccatgattcaagaatatggatatgtgatgccaagcttacataacagaactatggggtggttctatgtttcaggaggtcctgacttgtctctttcttctgtgaaccaacttttacctgaaatgtaatttgggggtacttttggggcagagtgtatctttaaacatttgagagagattctattatttaaattttctgttgccttttaaaaaggagtttcgaagaagggggtcagttgttgcagagcttgtttttgtgtatgaggacatagataaagacctgagagaaaatcaaaattttgaccttgttgaaaataatgagtttgggctactactaggagactggagagggtgcttgtgggtaaatggggggagcatggcagggcagtgactgtcaggggattggagatttgaagagagagaaaacaggactgtttctaagacagagaccttaggtaaaataaaaagatgctcagaaataattttatgaagttcatgcatgctatgtgtgacatctgtgcttttttcctccctcctgtaaagggcccccaaatgggcttactgtcctgataacagtgtttttattttactagaaatttaaaacactggcattaagatgaaaaatatgtgtaaagcacctagtatagaaccttccatcaatccctcagtgttagctcttttattgttatggttgttattacaacatgagctcaataaatggagctgtccttatgattacacacagttctattgcattgttatccctgtttgcttggcactaaaacttactctcaaggcagttcaatgattaaaatcacacagctacaaaatagtaggaagatatgtgaactttaattatgctggcttctagctttgtctttctttggcttccagctttgtgtttgtgattgactgatgagaaaatagtcactgcttttttacctccttcccaaacctgttcttccatccagtcacacaagcaagatacctaggtgtacccctagactctaccttcttccttcttttcccaaatctatcttctaactctaattaatcaacaagttttactggctcttcttctttatttatcatcatgtcaaacttgttttccttcatatcctattctaatcgtacggaactactctatttctcctgatccatttatgctctctatcatctgcataactttgcacatgttattacttttgcctggaacactttccctttccccacctctcctttatttggcttagttaattttttaggactcagtccagttctcaattttacattatctaatcatctcagtctctgtgagatttctactctgagctcccagagcacattgtgctcatgtcacttttgtatcatgaagggcccagaaaccacactattttaacaaagaatttaatatagggaattggtagaatagatgtttaaggaatgaaaaaacaaaaaaaaagtaacactgaagtaacaccaagatgataactgcaggaaacagcaaactgagggaacaccctaggtatgagggaacaaagggaagaaattgggattatcagaatctaggagctcaaaggaaatgcctgcagagctgggaccaagacatctgtgaagagggtgttgcctggctgctgcttctacctcagaaactttgaaaggggacctcatattcagagctgtggttcagaattctgagaagcagctgccagctgactggtgccagtatttctgagggtgtgtgatgagactagttctagagtgtgggaagaaataggaaactggaatcaactactgttgcctggatgaaaggctattgytgaaacaatggtgtcaggaacagcaggcaaactggaagaaacaaaccccttcacctcttttctttcctcctagtctttctctggcacccatatttgaaggatccaagagggcacaaattatcaaaggaaagtttagttttctgagtcccatcagaaagtggcatatagagggggtggagccaagatggccgaataggaacaactccagtctacagttcccagcgtaagcgacgcagaagatgggtgatttctgcatttccaacggaggtactgggttcatctcactggggagtgctggacagtkggtgcaggacagtgggtgcagtgcaccgtgcatgagcagcagcagggcgaggcatcacctcacccaggaagtgcaagggatcagggaattccctttcctagtcaaagaaaggggtgacagatggcacctggaaaatcgggtcactcccaccctaatactgtgcttttccaacragcttaacaaaggacacaccaggagattatatcccgcacttggatcagagggtcctacgcccacggagcctcactcattgctaggacagcagtctgagatcaaactgcaaggcagcagcgaggctgggggaggggcgcctttgctcaggcttgagtaggtaaacaaagtggccaggaagctcaaactgggtggagcccaccacagctcaaggaggcctgcctgcctctgtgggctccacctctgggggcaggacacagacaaacaaaagacagcaataacctctgcagacttaaatgtccctgtctgacagatttgaagagagtagtggttctcccagcacgcagcttgagatctgagaacaggcagactgcctcctcaagtgggtccctgacccccgagtaccctaactgggaggcacccctcagtagggccagactgacacctcacattgcccagtactcctctgagacaaaacatccagaggaacgatcaggcagcagcatttgtggttcaccaatatctgctgttctgcagccaccactgctgatacccaggcaaacagggtctgcagtggacctccagtaaactccaacagacctgcagctgagggtcctgactgttacaaggaaaactaacaaacagaaaggacatccacaccaaaaatccatctgtacgtcaccatcatcaaagaccaaaggtagataaaaccacaaagttggggaaaaaaacagagcggaaaaaccagaaactctaaaaatcagagcaccactcctcttccaaaggaatgcagctactaatcagcaatgcaacaaagctggatggagaatgactttcacgagttcagagaagaaggcttcagatgatcaaactactgcaagctaaaggaggaagtttgaacccatgacaaagaagttaaaaaaacttgaaaaaagattagatgaatggctaactacaataatcaaggcagagaagtccttaaaggacctgatggagccgaaaaccacagcaccagaactacatgatgaatgcacaagcctcaatagctgatttgatcaagtggaagaaagggtaccagtgatggaagatcaaatgaatgaaatgaagtgagaagagaagtttagagaaaaaggaataaaaagaaatgaaccagcatccaagaaatatgggactatgtgaaaacaccaaatctatgtctgattggtgtacctgaaagtcacggggagaatggaaccaagttggaaaacactctgcaggatattatttaggagaaattccccaatctagcaaggcaggccatcattcagatccaggaaatacagagaacagaacaaaaataaccctcaagaagagcaactccaagacaaataattgtcagattcaccaaagttgaaatgaaggaaaaaatgttaagggcagccagagagaaaggttgagttacccaaaaagggaagcccatcagactaacagctgatctctcggcagaaactctacaagccagaagagagtgggggccaatattcaacattcttaaagaaaataactttcaacccagcatttcatatacagccaaactaagcttcataagtgcaggagaaataaaatcctttacagacaagcaaatgctgagagattttgttaccaccaggcctgccctgaaagagctcctgaaggaagcactaaacatggaaaggaacaaccgataccagccactgcaaaaacctgccaaattgtaaagaccatcaaggctagggagaaactgcatcaactaatgagcaaaataaccagctaagatcataatgacagaatcaaattcacacataaaaatattaaccttaaatgtaaatggactaaatgctccaattaaaagacacagattggcaaattggaaaaggagacaagacccatcagtgtgctgtattcagcaaacccatctcacatgcagagacacacataggctcaaaataaagggatggaggaagatctaccaagcaaatggaaaacaaaaaaaggcaggggttgcaatcctagtctccgatacaacagactttaaaccaacaaagatcaaaagagacaaagaaggccgttacataatagtaaagggatcaattcaacaagaagagctaactatcctaaatatatatgcacccaatacaggagcacccagattcataaagcaagtccttagtgacctacaaagagacttagactcccacacaataataatgggagactttaacaccccactgtcaacattagacagatcaacgagacagaaagttaacaaggatatccaggaattgaactcagctctgcaccaagcggacctaatagacacctacagaactctccaccccaaatcaacagaatatacattcttctcagcaccacattgcacttattccaaaattcaccacatagttggaagcaaagcactcctcagcaaatggaaaagaacagaaattataataaactgtctctcagaccacagtgcaatcaaactagaactcaggattaagaaactcactcaaaacccctcaactacatggaaactgaacaacccgctcctgaatgactactgggtacataacgaaatgaaggcagaaataaagatgttctttgaaaccaatgagaacaaagacacaacataccaggatctctgggacacattcaaagcagtgtgtagagggaaatttatagcactaaatgcccacaagagaaagcaggaaagatctaaaattgacaccctaacatcacaattaaaagaactacagaagcaagagcaaacacatttaaaagctagcagaaggcaagaaataactaagatcagaacagaactgaaggaaatagagacacaaaaaacccttcaaaaaaatcaatgaatccaggagctggttttttgaaaagatcaacaaaattgatagaccactagccagactaataaagaagaaaaaagagaataatcaattagacgcaataaaaaatgacaaagggcatgtcaccactgatcccacagaaatacaaactaccatcagactactataaacacctgtatgcaaataaactagaaaatctagaagaaacggataaattcctcgacacctacactgtcccaagactaaaccaggaagaagttcaatctctgaatagaccaataatgggctctgaaattgaggcaataattaatagcctaccaaccaaaaaaagtccaggaccagatggattcacagcagaattctaccagaggtacaaggaggagctggtaccattccttctgaaactattccaatcaatagaaaaatagggaatcctccctaactcattttatgaggccagcatcatcctgctaccaaagcctgacagagacacaacaaaaaaaagagaattttagaccaatatccttgatgaacattgatgcaaaaatcctcaataaaatgctggcaaaccgaatccagcaacacatgaaaaaacttatccaccatgatcaagtggggttcatccctgggatgcaaggctggttcaacatcggaaaacgaataaagttaattcagcatataaacagaaccaaagacaaaaaccacatgattatctcaatagatgcagaaaaggcctttgacaaaattcaacaacacttcatgctaaaaactctcaataaattaggtattgatgggatgtatctcaaaataataagagctatctatgacraacccacagccaatatcatactgaatggacaaaaactggaagcattccctttgaaaactggcacaagacagggatgccctctctcaccactcctattcaacataktgttggaagttctgtccagggacatcagacaagagaaggaaataaaggacattcaattaggaaaagaggaagtcaaattgtccctgtttgcagatgacatgattgtatatctagaaaaccccatcgtctcagcccaaaatctccttaagctaatatgcaacttcagcaaagtctcaggatacaaaatcaatgtacaaaaatcacaagcattcttatacaccaataacagacaaacagagagccaaatcataagtgaactcccattcacaattgcttcaaagagaataaaatacctaggagtccaacttacaagggatgtgaaggacctcttcaaggagaactacaaaccactgctcaatgaaataaaagaggatacaaacaaatggaagaaaattccatgctcatgggtaggaagaatcaatatcatgaaaatggccatactgcccaaggtaatttatagattcaatgccatccccattaagctacaaatgactttcttcacagaattggaaaaaactactttaaagttcatatagaaccaaaaaagagcccgcattgccawgtcaatcctaagccaaaagaacaaagctggaggcatcacgctacctgacttcaaactatactacaaggctacagtaatcaaaacagtatggtactggtaccaaaacagacatatagaccaatggaacaaaacagagccctcagaaaaaatgccgcatatctacaactatctgatctttgacaaacctgacaaaaacaagcaatgcggaaaggattccctatttaataaatggttctgtgaaaaccggctagctatatatgtagaaagctgaaattggatcctttccttacaccttatacaaaaattaattcaagatggattaaagacttacatgtcagacctaaaaccataaaaaccctagaagaaaacctgggcaataccattcaggacataggcatggacaaggacttcatgtctaaaacaccaaaagcaatagcaacaaaagccaaaattgacaaatgggatctaattaagctaaagagctcctgcacagcaaaagaaaccaccatcagagtgaacaggcaacctacaaaatgggagaaaattttttgcaacctactcatctgacaaagggctaatatccagaatctacagtgaactcatacaaatttacaagaaaaaaacaaacaaccccatcaaaaagtgggcaaaggatgtgaacagacacttctcaaaagaagacatttatgcagccaaaaaacacatgaaaaaatgctcatcatcactggccatcagagaaatgcaaatcaaaaccacaatgagataaccatctcacaccagttagaatggtgatcattaagaagtcaggaaacaacaggtgctggagaggatgtggagaaataggaacacttttacaatgttggtgggactgtaaactagttcaacccttgtggaagtcagtgtggtgattcctcagggatctagaactagaaataccatttgatccagccatcccattactgggtatatacccaaaggattataaatcatgctgctataaagacacatgcacacgtatgtttattgcagcactattcacaatagcaaagacttggaaccaaccgaaatgtccaaaaatgatagactggattgagaaaagttggcacatacacacaatggaatactatgcagccataaaaaaggatgacttcatttcctttgtagggacatggatgaagctggaaaccatcattctcagcaaactatcacaaggacaaaaaaccaaacaccacatgttctcactcataggtgggaattgaacaatgagaacacatggacacaggaaggggaacatcagacaccggggactgttgtggggtggggggaggggggatgggaatacattaggagatatacctaatgctaaatgacgagttaatgggtgcagcacaccaacatggcgcatgtatacatatgtaacaaacctgcacgttgtgcacatgtaccctaaaacttaaagtataataataataataataataataataaaagaaatatcttcacataaaatctaataaaaaaatgtggcatatagaatacttgtttcagggctgagagataataatataaaaactggttcaacattgcatagtcattgtggtgttggttgtctcacccaccagactctgagttcctcagtggcatggaccatatctttttaatcttattgtcttcagtgtgtagaacatgatctgagatttagcatttcttcagtaagtaacgaattaatatacatgtgtttagacaatgtttgttttggagctcctgaatgcagtttcgtcttatgctctgcaatctgttggcttcctatatcttcctggattatgatttattgttcactgtttttcttgcttgcctggaaaagtacaaatttgttactagttttagactttgctccctgaagcatctattgtcatgcatttcatccaataggtatattcttcccaatctgtgaatgacatagaaaatggtcacggcaaactttctgggagccctagagtccagagatgtcaagactcaaaatacacacttacagaatcacacagacctgggacaaaattcttcctctgttagttatttcatgaacttaggcatgtttttgaatctctgtgaatctttgttttatcctttctaaaggggaaaataatatggaccctcaaaatttatagttttatggatttaaatgcttgaaaacactttcattcatttatcccacaaatggttattgaatgcttactatacacctggtagcatgctaggtgttgaagatataaagataaacacaacagtccctgacttctttcagctcccagtctggtggttgaagcatgagaataaccattatttacagcacagtggaattagtgctctgataggggaagaaaagagtactgtggtatcatagagaaggttactgatccaagactggagaggtgtcagaaaaggctttctggagaaagtgatataatgtgttgctttccaccaaaaagctatccaaggagtagaatcctccttggatttcgctcccctaccactggctgtacttgaatcactgagcaagtgcaggatttcaagatatatagatttttttaaaaaccctctcagacctcaataaatctttcactcaacccacattggccagcctatgtatcatctggtgtcacagccacccttaggcctcatcctgtttgtctccatagaagcaagggtaaggatttttggctgaggttccttgtttcagcttggctgaaactatgaggatttccttggtctcaggagtctagtgctgccctgtgccactgaggccacatgtaagggtatccaatttcctttatgcctttatcaaccttcccttggaagttctctgcttgtgctgattgtatgtggctgaagttkgggcaatgctaatsaaggggatttcaagaccttaggaaagtgtacatacttaaggcactaccttttctccatccttggaaagaacaggactgggaagcctgattgccctgccccacctggttgggaaactcctgggagacaagtgtttcaggaaccctgtcttgcatgaacaaatattgtgccagtaaatgttgctgataacatcagtattggtaggacttgttgaagaaatagctgctgcagttcttctcattgtttttctgatatagagacttgtaacccacttcctaaatttcattttgccacttccctaagctctatggtttgggtgacatggctttggcttaatcttctgtgattctaatcctttgattttcctgacaagaattttgttgactgtcaggagaacctgatgaattagaaatgatgatagtgatagccaccatttactgagtggctcttctgtgctaggtactgtgtttatgcattatgacatttaaataacaaagcatgtagattttattgttaccaccattttatagctggagaaacagtttaggaagttgtcacttgcaaggttatataaccacctcagatcagtctttctccaaagcctgggatttgaccactctgctacactgctttttggatagccaggttctttgtgtttgtaagaggccagattgcaacattctcagattaatattttgccgtgcctaattcgctaccaaaattgtctcactttttttaacataagtaagcttctaaaaaatgtagtcaatacttatttttctgaatccttacctctaatttacacctatactcactgaaatctagcttctgttcctatgactcaattaaaaataacctgctggctgggcgcggtggctcacacctgtaatcccagcactttgagaggctgaggcgggcagattacctgaggtcaggagttcgagaccagcctggccaaaatggtgaaaccccatctctactaaaaatacaaaaattacctgggtgtggtggcacatgcctgtaatcccagctactcagggggccgaggcaggagaattgcttgagcccaggaggtggaggttgcagtgagctgagatcttgccactgcactccagcctggccgacagagagagactgtctcaaaaacaaaacaaaacaaaaaacaaaacaaacaaacaaaatagcctgctaactctatcagtttgggctgtttccactgcaaagaacagaaaatccaattcaaaatgactgaaagcaatacggaaaatatactatcccacaaaccagtaagtcttttggtatgttagctctagaattgattgactcagcagctgaaaaatgtcatcattaacctgttttcagtcttttgccttggacatcctagtttgtcagccttattagactagatcttctcattgtcataagatggctgctatgccttatgtctcaagagacaaaattgtgaccagataccactggtaaaccaatttttggcaaggtgaawaacattactgtgattgcactaaacaaataagaaatcacacacttaaggttagagattgggcctattccctgtaaggcatatggcagtacaataaagagagttgcctgaaaaattgaagttatatttataaagggaaaaagtggattttggataggcagcgaacaatgtctgcaactcttgacaatatgactttgagtgagtccttaacctctctttatctcagtttcctcataatcataatgaagcagttgttatgtacctaatgggattattgtgaggatggaacaacttaatgaatttaaaacacaataattggcacataaaatagactcagtatattgtacatgttggtcttattatcaaaatgataattgtcctgttcttgaagtcattgctacctttggcttctagacagtgctcttctattattttattatttaactcttacacatctaaatacattttattcttccttaaggtgtgattctgtaattttgtgtgtgtgtgtgtgtgtgtgtatgtgtataatggttcatgtagttataaatatacttagccttggtcttctatgacttcaaatatcatttgaacactgataactcctggaactttgtctgcagcccagacctttcctctgagctcaattcccatatatgtatatctacctacttgacacctctaccaggaagtcacatgggcaccaaaagtcaaaataattaaaatcaaactcatgaaatgaaaatttcagtgaatgacattgccaactactataagccagaaaaactggaaaaaaaaattccttcatcccccacattctaaccttctaatattttataagagttctaccttctaaatatctctctcaagatctcatctctaaataactctacttttctctacctcaactgctgtcactttagtcccaatcaccatcatctttgcctactgcagtaatctttatgtttctagttttgctctcccttccccatactttttattttgcaaaagccaaaggatatctgtaaatcactaaagagattatgcccctttcctgctttaaacatttcaatacccagactccctagaacgccatgtaagggccctttgtaatctggcataccttagtttttcagctttatcttgtgccattctcccacatataacttcctttttactccacttgggtatttttgccattcatctgaagggtcccttctagttcagtccagctttttgagttattttcacctcctaatcacagactttctccttcagctactaccccatctgatatctatctttctgagtactcttttcctcagactggttgcagactgggacactgtgcctcaaggttttctttcctaacgtttcctaaacacaaggctacaggccgttttgccttggatgaggctcacatccagagaagctttcagtaactagcagtcttaggcatgtggatgctttactgaggttccaagtttgtgcctattggaaatattggtcttaggttcccaatccttctgaattggcaactgaaagctttcttatttccagaaagtgggtaacttcaacttcacacccttctgcttctttttgtgcaaccaaagtgtgagggatgggatataagcaaagcaaaaagtgtccttttccccaagtagacagtatgtatctgcaaggcccccagaatgtgtaacacttagagtgctggcctttactctacaaatggtaatgatgctactttgtaactagctatagacacacagaaatgtctatagtttctaaatggctgtgctgacaattattcttttcattgcaatagaattgtacttttactggcttatgggtgtgaaaaggtagtggtgtggccaataatcataaagatcctcacaatttgacaaattatgagacatttgaacaactagaccctgggaagttcagggactgatgtagctctggactctcaaacgtaggasatttgtgggccttcatttaagagccctgccattaatgtgttctaaccaaccccagtccttctttcttttagttgaacctctagggaaagagataattttatttgtttcacttggctcaagtgttcagtacaacgagactagcaacatcttgtgtgtgtgtgtgtgtgtgtgtgtgtgtgtgtgtgtgtgtatatatatacacacacactatatgtatacactatatatataccatatatatgtatactatatatacactttatatacaccatatatacactatatatatactatatatgtactatatatgtgtatatatatacacactatatatacactatatatacaccatatatacatatatagtactatatagtatatatagtgtgtatatatactatatagtactatatatgtatatatacacacacgtatacacacacacacacacagatacatatatatatatatatatagcctttgtcctctgagtaccgctggcccaccaatagggttatatgcatgacaacagggtttttacccctatcgttgggccagtagtactcagagaacaaaggctagacaaataaccaaataagttttcattagaatgagccatgttttctcatcccttcatctttctattctctctgtttggggttcttcttctctataataagaagcattagtagtatcagtgatagttagcacttgtgtgcttacaatgttcccggtactgttgtagtgctttacaaatgcagtagctaattgcataatatcaacaattctatgaggtaattatttttagctccattatacagatgaggaaactgaaatacagaaaggttaagttaagttttcgaaggagatacagtaaatagtggagctgagatacaaaactatgcattctctctctagattaatattgttcaatagaaataaattatgagggaaatgtgcaatttcacatattctagcagctgtattttaaaaagtgaaaagaaacaggtggaattaattttcatagtacatattatttaactaaatatgtcaaaatactttcaacatattgcattagccacattttaaaaatataatatcaacttttatcttaaattcaaggggcacatgtgcaggtttgttatatgaatatattgtgtgatactgaggtttgggatgcaaatgatcccatcacccagatagtgagtatagtatccaacagtttttcaaaactttccctcgctcacacacttccgcatctgttagtccccagtgtctattgttgctatctttatggccgtgagcatccagtatttagctcccactgagaaatgagaacaatgtgatatttggtttttgtgcctgtgttaattaggttaggataatgacctctgggtgcatccatgttgctgcaaaggacatgatttcattctttctgtggctgtgtagtattccatgatgcatatacaccaaattttctttatccaatccaccattgatgggcatctagattgattccatgtctttgcgattgtgatagcatagtgatgaacatacaaatgcaagtgtctttttggtaaaactatttattttcttttgggtatatacccagtaatgtgattgctgggtcaaatggtagttttgttttaagttatttgagaaatctccaaactgctttccactatggctgaactaatttacattcccatcaacattcccttttctctgcagcttcaccggtatctgttgtttttttacttttaataatagccattctgactggtgtgagaggatatctaattgtggtttttatttgcatttctctgatgattagtgatgatgagcattttttcatatatttcttggctgcttgtctatcttctttggagaagtgtccattcacatcttttgcccacttttaagtggggttatttattttttgcttgtttaattgttgaagttccttatagattctggatattagatctctgttggatgcatagtttgtaaatattttctcctattctgtaggttgtttattacatcacatgagtgtcaggattaactgactgtacaatatttaaagtactgcccaatacctgaaatatatcattaattgttaaatatcattatatcattatcctggcatactctgtaactcctgtctcctccatttctagcatattgtcatatacacatggcagtaaaaaatcctcctttttagaaacttccaacagttctttatatccattttcccaatgcattctcactaccaccatgttagatagatattattgtccccaatttacaattgaagcaactaaaatccagtgaaatgaaagagcttgcatagttcacaaaactaggaaatgagagttccctaatttttattcatcttaaaagcatagacattatcatattcattttttaatactttgaatatttgttgaagtaatcaataaatgtcattggtatttccagtgagcccaaagatattttattaaagttattttaagtcacatgaaaggttatgtaaaggattttaaatttcattttcaagaattaatatttgtgatactgagaaatcacactggaattgcatactttagtgattgtattaccacatacatttaaactgtgttcttttgggcatattgacttattgtttcattctggaaattgctgtaattatgtccattatagaacatttgcaaaaaacaacaaaaaattacctataatcatagcaccaaaagagtagttattcactgttaatgttttgcttacgattttcacatgattgaggttatactaggaatatactgctataaccttctcttttcacttacattaaatgacattacatcataggaatttccgaagtgcagtaaaacttttaggaaacaccactttttattttattttattttaagtactggggtacatatgcaggatgtgcaggtttgttacaaggtaaacgtgtaccatgatggttttctgcacctatcaatccatcacctaagtgttgagtccagcatgcattagctattttatctgatgctctttccacccctgagaggccccagtgtgtgttgtttccctccctgtgtccatgagtcctcatttttcagctcccacttatgagtgggaacatataatgtttggttttctattcctgcattagtttgctgaggataatggcttccagctccatccatgtccctgaaaagaatatgatctcatttctttttgatgtaccacattttctttatccagtctaccattgatgagaatttgggtggattccatgtgtttactattgtaaatagtggcgcaatgaacatatgtgtgcatgtatctttataataaaatgatttatattcttttgggtatatatccaataatgggattgctggatcaaatggaatttctggttctaggtctttgaagaattgtcacaccgtttttcacaatggttgaactaatttacattctcaccaacagcgtaaaagcattcctttacctctgtagcctcggcagcatctgttgtttcttgatttttaacaattgccattctgactggtgagagatggtatctcatttaggtttttatttgcatttctctaatgatcagtgatgttgagctttttttcatgtttgttggctgcataaatgacttcttttgagaagtgtctgtttatggcctttacgcaacaccacgtttattggccatacagttgtctcttgtagatatctataattatttatttggtgacaaggagattttatttgtttttctaatataaataatgatgcactgaccagctttctgtatggataattcttactaggttggattactgttcttatgatggattcctaaaaggagaatcactggctcaaatggtcagctttataaggctcttgacaagtacattaactttaatatgttgattacatattaacatgttgatatgggtattcttttaataaagttggttggatgacttgtttagttaaagtttgcattgttttatttcttcttaggtttgaggaagcgatgaaggaggctcatgctgtagatcaaaagcttgcagagaagcaggaagatgaagccaccctggaaaataaatggcccttccttggggttcctttgacagtcaaggaagctttccagctacaaggtactattcttttatttttggctacatgagtttaattcacaagttgctacattttctaaacttataaactaaaaaggatggtataaaagtgaaggacaaactcatgctgcttcctcagtttgaaatgagaggaaatattcagcaagttccattgggaaaataaatgataatggtcatcctctgttagctctgtatggcatatgggggcactatgctcagtatccattaatccttacagcaaacttataagaatagtattattgatctcatttttcagataagaaaattgaggctcatgaccctaaagtagttaggctaaagccaagcttgaattctgataaatacctgtgctttctctgtaatacagttcttattttgtaacttcctgctagcctcaaaagtaaatgaaaatcccaaatatttggaaagtaaacaacgtatttttaaataacccataagtcaaagaaataaatcacaaggaaatgtttgaactgaaagaaaaaatataataatataacaaaacttatgggatgtagctaaattagtacttagagggaaatgtatggctttcagtgaatatacatgaaaagaaagatttaaaatcagtaactgaagcctggccttaaatggctcctgcgaaaggggtcagtgagggaactgaggcctcaccttcaccaggaatctttgggatcctagctataggggaacccttgtcgcccgtgggtgtatgagctggcaggaagatctgatggagagcaggcagagatgggccttcagagggcttggagcctggaagcttttggtgctctgggcagctccagctgagagtagccataggcaccaatccccaagtcttcccattcctccraggaggtgcaggccgggatgacctctgacccaggagagagcagagccagcttcttcatgggactgaggtgcatctgctctgcaagctttcctgcctttcagctactcccagcatccatgcctagctactctgcaggagcaggtgcacataacagcccctgcagcccaacctcagtgtattgatgcacgtgagtactttcctagctagcctggagcatattggatcccctagcacaggcagaactgagtcccagctaagagacagtcaggtgcacccagggctacagcgtgctacttgagagtaaggagcagagatctgtggacagtaatgaagctggggaggagctcccaaccccagaacactgagaagggagagatgcatgggtttctgrgcaaggtgagatggggcatgcctccctccacagggtgggtccatagagtgtggcatatctctgctgcagcccctgcccaagagggctggtggtacagaatagctaataaaagaaatgccagcacagcaccattgatcacagggggctctcccaaatcccaggagcagatctggtgagggaggtgctgtctctttctgctctcccaactcaagagcatgcctgcatactaagggaaatacagaagagctgcacagcttggtattaaactagctaccggccattactcttatgcttcatctactggattgcagcccaaactacaacatcaatcaatcatccggctaatatgtgcacctgtgaaaccaagtgcaagaattcaaacacacataaagatcctatagaggccaggcacagtggcttatgcctgtaatcccagcactttgggaggccgaggcaggtggatcacctgaagtcaggagtttgagaccagcctggccaacatgatgaaaccacatctctactaaaaatacaagaaaaaaaaattagctgggcatggtggcgggcatctgtagtcccagctacttgggaggctgaggtaggagaatcgcttgaacctaggaggtggaagttgcagtaatccgtgccattgcactccagcctgggcaacaagcacaaaactccatcaaaaaaaaaaaaatcctatacagaacactagccttctgaaaggatccacaaatatagccaactaactatactgaacttacaccacagttacagaaataccaatcctcaaatattagaataaatcagtgcaagaactctggaaatccaaaaagtagagtatctttattgacctcaaaacaagtccaatagctccccagaaatggtttttgaccagtctgaaatgactgagatgacacagtcttcagaatctgggtgtcaatgaaacttactgagattcaggagaaagttgaaatccaatccaaggaatgcaaagcatccagtaaaatgatccaagagatgggagaaaaaatgggcattttaggaaacaacaaaacagagcttctagaaattaaagactcactatgagaatttcataatacaattagaagtattaacagcagagtagaccaagctgaggaaagaatccaatcccagagcttgaataccgttttttcaaatcaccttagtcagacaaaaataaagaaaaaagaaattagaaaatgaatgaaacctccaagaaatgtggaatgatataagaaaaccaaacctatgactcatcaggattctcaagagagaaggagagagaataatcaacttggaaaatatatttgaggtgaagaggttgacaccagtctcggtgaagaggttgacatgcaaatcaaagtggtacagataatggtggccacatactatataagatgaccatccccaaggaacatagtaatcagattcaccaaggtcaatacaaaaataaataaataaataaataaatacatcttaaaggcagctagagagaagggttaagtcacatacagagagtactccatcaggcaagcagtagatctctcagcagaaaccttaacaatgagaagatattgggggtctactttcagcatccctaaagacaagaaattccaaccaagaatttcatttcctcgcaaataagcttcataaatgaaggagaaataaaattcttctcagacaagaaaattctgagagaatatttttcaactagaccaaccttacatgaggcccttaaggaagtgctaaacatgagttcaaaagaatgacaccggctgtcacagagacactcaagctgatagcttgcatgcactataaaacaactatgcagtcaagtctatataacaaacagctaatagcatgacttgaataaaatcacacatatttgaatgtaaatgaactaaatgtcccaattaaaatacagggtgtcaggctggatgaaaaaacaagacccaaccatctgttttctctaagaggcccatctcacatgtaatgacacccacatgctcaaagtgaaaggatgtaggaagatctatcatgcaaacaggaaacaaaaaagagcaggagttgctattctttttatcagataaaacagatcttaaaccaacaacaatcaggaaatacaaagaagggcattatataatgataaatgttttaattcaatgagaagactgaaccatcttaaatatgtatgcacccaacattggagcactcagattcacagaaaaaatcttcatgacctgagaaaaatcttagacagccacacaataatagtaggagatttcaaaaccccactgacagtgttagacagatcatcgaggcagaaaactaacaaaagaaactcagggcttcacctcaacacttgagcaattgcgcttaatagacatctacaaaatactccacccaaaaaccatggaatatacattcaactcatctgtacatggagcatactctacacggtcagtcatacttcaagtctcaataaattaaaatattgaatcttaccatgcacactcttggaccagagtgaaataaaaatagaaatcaatatcaatatctcccaaaactacacaaatacatggaaactaaacaactttctcatgaaaaactcctagatggacattgaaattaaggcataaatcaaaaaaagtgattaataactcttaggtgaacatcaaaattaaggcagaaatacaaaaaaacaaaaaaaatctctaaaattaatgaaaatagtgacacatcttaccaaagtcattaaggcgccactcaagcattgttaccaggaaagtttatagaactaaatccttcttcaagaagttggaaagatctcaaattaacaatataacataacgccaatgtgaactacgataataagaaaaaatcaattccaaagccagcagaagaaaagaaataactaaaattagagaacttagtaaaatatagatgcaaaaatctatacaaaagatcaatgaaattaagagtttgtttttcaaaaataagttagactgctacctagattaaaaaagaaagagaagattcaagtaagtacaatcagaaatgacaaacataacattacaacttatttcatggaaatacgaaagattgtcacaatcaattcaatgcacacaaattaaaaaatatatagaaaatgtaaatattcctggaaacacaccttcttccaagattgaatcaggaagagagtgaaaccttgaacagcccaatattgagctgtgagatggaatcggtaataagaaacctaccaatcaaaaagtgtcctggactagatggattcacagccaaattctaccagacatacaaaaaagagatgctaccaatactactgaaactattctaaaaaatggaggaggagggactcctctctaactcattctatataaagctatcatcaccctaatacaaaaatctggcagagacacaacagaaaacaaaaacttcagaccaatatccctgattaacataaactcaaaaatcctcaataaaattctagcaaaccaaatccagcaacacaacaaaaagttaactcattatgatcaagtagggattattcctgggatgcaagattggatcaacatatgcaaatcatttaatgtgattcaccacgtaaatgattaaaagtaaaaaccatgtgatcatctcaatagatgcagaaaaataacttttgatataattcaacaccccttctttatactaactcccaacagactaggcatcgaaggaacatacctcaaaataataagagtcatctataccaaacacacaggcaatgtcacactaaatgggcaaaagctggaagcattcttcctgagatctgaaacaaggaaagagtgcccactctcactactcctatttgacatagtactggaaatcctagccagagcagtcaggcaagagaaagaaaaggcatccaaataggaaaagaagtcaaactgtctctctgttgatgatatgatcttatgcttagaaaatcctaaagactccatcaaaatcctactaaaactgataaacaattttagcaaggtttcagaatacaaaatcaatgtagtaaatcggtagtataatgatgtcctggttgagattcacacaatcccatttacaatagtcagaaataaaatggaatacctaggaatacagctaaacaaggaggtgaaagatctctacgagaactgcagaacactgccgaaagaaaccagaaatggtataaataaatgtaaaaacatttcatgttcttggattggaaaaatcagtattgatgaaatcgccatacatccaaaaacagtttacagatttaacgctattcctaccaaactaccaaagacatttttcaaagaattggaaaaaacctattttaaaattcatatggaatctaaaaagagcctgaatagccaaarcaatcctaagcaaatagaagcagagatatcacactaccccacttaaaactatattataaagctacagtcaccaaaacagcatggtgctggtacataaacagacacatagaccaatggaacagaacagaaaactcagaaataaagtcacacacatacaaccatctgatctttgtcaaggccaacaaaaataagcaatgggggaaggactccctattcaatacatggtgctgggataactcactagccatgtacagaagactgaatctacactcttatctttcaccataggcaaaaactaactcaaaatagataaatatttaaatgtaagacgtcaaactctaaaaaagttgagatgaaaacctaagaaatacccttctctatattgaccctgtctccccccaccgcctccaaaaaaacatggtcaactccctaaagctattgcaactaaatgaaaaatttacaagtgggacttaattaaactaaagaccttctgcacagcaaaataaaccatcaacagaataaacaggcaacctacagattgggaggaaatattcataaactatgcatgcaataaaggtctaatatccagaatctataaggaacttaagcaaatcaacaactaataaacaaataacccattaaaaagtgagcaagagacatgatcagacattactcaaaagaagacagacaagtggccaacaaatatttgaaaaatgctctcaggatcaagttcacaaataacaatattagccttaaatgtaaacgggctaagtgccccaattaaaagacacagactggcaaattaaataaagagccaagacccattagtctgctgtattcaggagatccattgcacatgcaaagacacacataggctcaaaataaaaggatggaggaatatttatcaagcaaatgtaaagcgaaaaagagcaggagttgcaatcctagtctctaataaaacagactttaagccaacaaagatgaaaaaagacaaagaagggcattacataatcataaagggactttgtaccaagaagagttaactatcctaaatatatatgtacccagtacgggagcacccagattcataaagcaagtttttagagacaaacaaagagacttagagtcctacaccataatagtgggagactttaacaccccactgtcactattagacagatcaacaagacagaaaattaacaagaatatttaggacttgaactcagctctggaccaagtagacctaatagacatctacagaactctccaccccaaatcaacagaatacacattcttctcagcatcacattgcacttattctaaaattgaccaaatatttggaagtaaaacactccttagcaaatgcaaaataatggaaaatataaccaacagtctctcagaccacagtgcaatcaaattacaactaaggattaagaaactcactcaaaacggcacaactacatggaaactgaacaatctgctcctgaatgactactgggtaaagaaattaaggcagaaataaacatgttatttgaaaccagtgagaaaaaagacacaatgtactgggatctctgagacacagctaaagcagtgtttagagggaaatttatagcactaaatgcccaaaggagaaagtaggaaagatctaaaattgacaccctaacatcacaattaaaagaactagagaagcaagagcaaacaaattcaaaagctagcagaagacatgaaataactaagatcagagcagaactaaaggagatagagacacacaacaaacccttcaaaaaaaataaatgaatccaggagctggttttttgaaaagattaacaaatagatatactgctagccagactaataaagaagaaaagagagaagaatcaaatagacacaataaaaaatggtaaaggggatatcactactgatcccacagaaatacaaactaccatcagagaatacttataaacacctttacgcaaataaactagaaagtgtagaaaaaatggaaaaattcctggacagataaatcctcccaagtctaaagcaaaccaggaagaagtcaagtacctgaataggccaagaataagttctgaaattgaggcagtaattaatagcctaccaataaaaaaatcccagaactagatggattcacagccaaattctaccagaggtacaaagaggagctggtaacatttcttctgaaactattccaaacaatagaaaaagagtaactcctccctaatccattttatggggccagcatcgtcctgataacaaaccctggcagagacacaacaaaaaaagaaaatttcaagccaatatccttgatgaacatctatgcaaaaatcctcaataaatactggcaaactgaatccagcagtacatcagaaagttcatctaccactatcaagtcagcttcatccttgggatacaaggctgattcatcatatgcaaatcaataaacataatccatcacttaaacagaaccaatgacaaaaaccacatgattatctcaatagatgcagaaaaggccctccataaaattcaacaccctttcatgctaaaaactctcaataaagtaggtattaatggaacatatctcaaaataataagagctatttatgacaaacccacagccaatatcatactaaatgggcaaaaactggaagcattccctttgaaaactggcacaagacaaggatgccctctctcaccactcctattcaacatagtattggaagttctggccagggcaatcaggcaagagaaagaaataaagcatattcaaataggaagagaggaagtcaagttgtctctttttgtagatgacatgattgtatgcttagaaaaccccatcgtctcagcccaaaatctccttaagctgataagcaacttcagcaaagtctcaggatacaaaatcaatgtgcaaaaatcacaagcattcctgtacaccaatagtagacaaaaagagagccaaatcatgagtgaactcccattcacaattgctacaaagagaataaaatacataggaatacaacttacaagggatgtgaaggacctcttcaaggagaactacaaaccactgctcaaggaagtaagagaggacacaaacaaatggaaaaacatttcatgctcatgggtagaaagaatcaatattgtgaaaatggccatactgcccaagtaatttatagattcaatgctatccccattgaactgcaattgacttttttcacagaattgggaaaaactactttaaatttcatatggaaccaaaaaagagctccgatagccaagacaatcttaagctaaatgaccaaagctggaggcatcatgttaccttactgcaaagtatactacaaggctacagtaaacaaaacagcatagtagtggaaccaaaacagagatatagaccaatggaacagaacagaggcctcagaaataatgccacacatctgcagcaatctgatctttgacaaacctggcaaaaacaagcaatggggaaaggattccctatttaatggtgctgggagaaatgactagccatatgcagaaaactgaaactggacctctttcttacaccttatacaaaaattaactcaagatggattaaagacttaaacttaagacttaaaaccataaaaaccctagaaggaaacctaggcaataccattcaggacataggcatgggtaaataattcatgactaaaacatcaaagaaaaaatggcaacaaaagccaacattgacaaatgggatctaattaaactaaagagcttctgaacagcaaaagaaactatcatcatagtgaacaggcaacctatagaatgggagaayatttttgtgatctatccatctgacaaagggtaatatccagaatctacaagaaacttaaacaaatttacaagaaaaagacaaacatccccatcaaaaagtgggtgaaggatatgaatagacacttctcaaaagaagacatttatgtggccaacaaacatatgaaaaaaagctcatcatccctggtcattagagaaatgcaaatcaaaaccacaatgagataccatcacatgctagttagaatggtgatcattaaaaagtcaggaagcaacagatgctggagaggatgtggagaaataaaaatgcttttacattgttggtgggagtgtaaattagttcaatcattgttgaagacaatatggtgattcctcaaggatctagaactagaaataccatttgatccatcaatcccattactgggtatacacccaaaagattatatatcattctactataaagcaacatgcacatgtatatttatttgtggcactgttcataaaagcaaagacttggaaccaacccaaatgccaatcagtgatggactggataaaggaaatgtggcatatgtacaccatgcaatattatacagttataaaaaaagatgagttggctgggtgtggtggctcacgcctgtaatcccaccactttgggaggccaaggcaggtggatcatgaggtcggcagatcgagaccatcctggctaacatggtaaaacccccgtctctactaaaaaatacaaaaaattagctgggtgtggtggtgggcgcctgtagtcccagctactcaggaggctgaggcaggagaatggcgtgaatctaggaggcggagtttgcagtgagcccagatggtgccactgcactccagcctgggtgacagagcgagactccatctcaaaaaaaaaaaagaaaaccggatgaatgcatgtcctttgcagggacatggatgaagctggaaaccatcgttcttagcaaactaacacaaatcggaaaacactgcatgttctcactcaggagtgggagttgagtaatgagaacacatggacacagggaggggaccatcacacattagggcacattgggggttcgggatctaggggaaggatagcattaggagaaatacctaaagtagatgacgtgttgatgggtgcagcaaaccactattgcacatttatacctatgtaaaaacctgcacgttctgcatatgtatcccataacttatagtataataataattattattatactatttaaaaaaatagttttccaattgaaaactatttttcaattattttttaattaaaaaaataggtttccaattgaaacctctgcttttttctggtttccatttgcttggtagatttttctcaatttttaaaattttgagccaatggatgtcattgcatgtaatatgggtgtgttgaagacaacataacaaggagtcttgcttctttatctggcttgccactctgtgccttttaattggggtatttagcctgtttacattcaaggttagtattgatatgtatggatttgttgctgtcatcatgttgttacttggttattatgcagatttgtttgtgtttttgctttttagggtcaccagtctgtgtacttgtgtgtttctgtagtggtttgtaattacctattatttccatatttagtgcttcttccaggagctcttataaggcacatctggtggcaacaaatttgcttagcatttgcttacctgaaaaggatcttatttctcttttgtttatgaaacttagtttggctgaacatgaaactccagattgcatttttttttttttgagacggagtctcgctcagctcactgcaagctctgcctcccgggttcacgccgttctcctgcctcagcctcttgagtagctgagactacaggcatccgccaccgcgcctggctaattttttgtatttttagtagagacggggtttcaccgtggtctcgatcttctgacctcgtgatccgcgctcctcggcctcccaaagtgctgggattacaggtgtgagccaccgcacccggcctgcattttttgtttttaaagaatatttgatgtaggtccccgatctcttcttccatgtaggatttttgctgagaggtctcttgttagtttgctggacttccttttataagtgacctaccctttctctctagcctttaacttttttttctttcatttcaactgaagagaatttgactattatgtgttttggggatgaccttctcatgaagcattttgcgtgggttctaagcattttctgaattcgaatgttggcctctctgtctagtttggagaactttctcattggtgatatcctgaaatatattttctaatttgccttctttctctttttcttttctggaatgtcaatgagttctagattcggtctctttatgttattccataattcatggaagttttgttcattaaaaaattcttttttctttactcttgtttcactgttttattttaaaaagtcaatcttcaagcttcaatattcttttctcagcttgggtattctgctgctaatgcttgtgatttctttttttttttgttttgttttgttttccttttttttaattatactttaagttttagggtacaggtgcacaacatgcaggtttgttacctgtgtatacaagtgccatgttggtgtgctgcacccattaacttgtcatttaatattaggtatatcccctaatgctatccttccccactttccccaccccacaacaggccccagtgtgtgatgttccccttcctgtgtccatgtgttctcattgttcaattcccacctatgagtaagaacatgcggtgtttggttttttgtctttgcaacagtttgctgagaatgatggtttccagcttcatccatgtccctacaaaggacatgaactcatccttttttatggccacatactattccatggtgtatatgtgtcacattttcttaatccagtctatcattgttggacatttgggttggttccaagtctttgctattgtgaatagtgtcacaataaacatacgtgtgcatgtgtctttatagcagcatgatttacaatcttttgggtatatatccagtaatgggatggctgggtcaaatggtatttctagttctagatccctgaggaatcaccacacggacttccacaaaggttgaactagtttacagtcccaccaacattgtaaaagtgttcctattactccacatcctctccagcacctgttgttcctgactttttaatgattgcctttctaactggtgtgagatggttatctcattgtggttttgatttgcatttctctgatggacagtgatgataagcatttttttcatgtgtcttttggctgcataaatgtcttcttttgagaagtgtctgttcatatccttcacccacttgttgatggggttgttttttttttttttttttgtaaacttgtttgagttctttgtagattctggatattagccctttgtcagatgtgcagattgcaaaaattttctcccattttgtaggttgcctgttcactctgatggtagtttcttttgctgtgcagaagctctttagtttgattagatcccatttgtcaattttggcttttgctgccattgcttttcatgttttagacatgaagtccttgcccatgcctatgtcctgaatggtattgcctaggttttcttctagggtttttatggttttaggtctaacatttaagtctttaatccatcttgaattaatttttgtataaggtgtaaggaagggatccagtttcagctttctgcttatggctagccagttttcccagcaccatttattaaatagggaatcctttccccattgcttgtttttgtcaggtttgtcaaagatcatatgtttgtagatatgtggcattatttctgagggctctgttctgttccattggtctatatctctgttttgataccagtaccatgctgttttggttactgtagcctttagtatagtttgaagtcaggtagcatgatgcctccagctttgttcttttgacttaggattgatttggcaatgcgggctcttttttggttccacatgaactttaaagtagttttttccaattctgtgaagaaagtctttggtagcttgatgcggatggcattgaatctataaattaccttgggcagtatggccattttcacgatattgattcttcctacccatgagcatggaattttcttccatttgtttgtatccacttttatttcattgagcagtggtttgtagttctccttgaagaggtccttcacattccttgtaagttggattcctaggtattttattctctttgaagcaattgtgaatgggagttcactcatgatttggctctctgtttttctgttattggtgtataagaatgcttgtgatttttgcacattgattttatatcctgagactttgctgaagttgcttatcagcttaaggagattttgggcagagatgatggggttttctaaatatacaatcatgtgatctgcaaacagggacaatttgacttcctcttttcctaatgaataccctttatttccttctcctgcctaattgccctggccataacttccaacactatgttgaataggagtggtgagagaggacatccctgtcttgtgccagtttccaaagggaatacttccagtttttgcccattcagtatgatattggctgtgggtttgtcatagatagctcttaatattttgagatacgtcccatcaatacctaatttattgagagtttttagcatgaaggttgttgaattttgtcaaaggccttttctgcatctattgagataatcaaatggtttttgttgttggttctgtttatatgctggattgcatttattgatttgtgtatgttgaagcagccttgcatcccagggatgaagcccacttgatcatggtggataagcttttagatgtgctgctggattcagtttgccagtattttattgaggatttttgcattgatgttcatcagggatattggtctaaaattctcttttttggttgtgtctctgccaggctttggtatcaggatgatgctggcctcataaaatgagttagggaggattccctatttttctattgattggaatagtttcagaaggagtggtaccagctccttcttgtacctctggtagaattctgctgtgaatccatctggtcctgaactttttttggttggtaggctattaattattgcctcaatttcagaggctgttattagtctattcagagattgaacttcttcctggtttagtcttgggacagtgtaggtgtcgaggaatttatccgtttcttctagattttctagtttatttgcatacaggtgtttatagtagtctgatggtagtttgtatttctgtgggatcagtggtgacatgccctttgtcattttttattgcgtctaattgattattctcttttttcttctttattagtctggctagtggtctatcaattttgttgatcttttcaaaaaaccagctcctggattcattgatttttttgaagggttttttgtgtctctatttccttcagtctgttctgatcttagttatttcttgccttctgctagcttttaaatgtgtttgctcttgcttctgtagttcttttaannnnnnnnnnnnnnnnnnnnnnnnnnnnnnnnnnnnnnnnnnnnnnnnnnnnnnnnnnnnnnnnnnnnnnnnnnnnnnnnnnnnnnnnnnnnnnnnnnnnnnnnnnnnnnnnnnnnnnnnnnnnnnnnnnnnnnnnnnnnnnnnnnnnnnnnnnnnnnnnnnnnnnnnnnnnnnnnnnnnnnnnnnnnnnnnnnnnnnnnnnnnnnnnnnnnnnnnnnnnnnnnnnnnnnnnnnnnnnnnnnnnnnnnnnnnnnnnnnnnnnnnnnnnnnnnnnnnnnnnnnnnnnnnnnnnnnnnnnnnnnnnnnnnnnnnnnnnnnnnnnnnnnnnnnnnnnnnnnnnnnnnnnnnnnnnnnnnnnnnnnnnnnnnnnnnnnnnnnnnnnnnnnnnnnnnnnnnnnnnnnnnnnnnnnnnnnnnnnnnnnnnnnnnnnnnnnnnnnnnnnnnnnnnnnnnnnnnnnnnnnnnnnnnnnnnnnnnnnnnnnnnnnnnnnnnnnnnnnnnnnnnnnnnnnnnnnnnnnnnnnnnnnnnnnnnnnnnnnnnnnnnnnnnnnnnnnnnnnnnnnnnnnnnnnnnnnnnnnnnnnnnnnnnnnnnnnnnnnnnnnnnnnnnnnnnnnnnnnnnnnnnnnnnnnnnnnnnnnnnnnnnnnnnnnnnnnnnnnnnnnnnnnnnnnnnnnnnnnnnnnnnnnnnnnnnnnnnnnnnnnnnnnnnnnnnnnnnnnnnnnnnnnnnnnnnnnnnnnnnnnnnnnnnnnnnnnnnnnnnnnnnnnnnnnnnnnnnnnnnnnnnnnnnnnnnnnnnnnnnnnnnnnnnnnnnnnnnnnnnnnnnnnnnnnnnnnnnnnnnnnnnnnnnnnnnnnnnnnnnnnnnnnnnnnnnnnnnnnnnnnnnnnnnnnnnnnnnnnnnnnnnnnnnnnnnnnnnnnnnnnnnnnnnnnnnnnnnnnnnnnnnnnnnnnnnnnnnnnnnnnnnnnnnnnnnnnnnnnnnnnnnnnnnnnnnnnnnnnnnnnnnnnnnnnnnnnnnnnnnnnnnnnnnnnnnnnnnnnnnnnnnnnnnnnnnnnnnnnnnnnnnnnnnnnnnnnnnnnnnnnnnnnnnnnnnnnnnnnnnnnnnnnnnnnnnnnnnnnnnnnnnnnnnnnnnnnnnnnnnnnnnnnnnnnnnnnnnnnnnnnnnnnnnnnnnnnnnnnnnnnnnncttgctagattggggaatttctcctaaataatatcctgcagagtgttttccaacttggttccattctccccgtgactttcaggtacaccaatcagacatagatttggtgttttcacatagtcccatatttcttggatgctggttcatttctttttattcctttttctctaaacttctcttctcacttcatttcattcatttgatcttccatcactggtaccctttcttccacttgatcaaatcagctattgaggcttgtgcattcatcatgtagttctggtgctgtggtttttggctccatcaggtcctttaaggacttctctgccttgattattgtagttagccattcatctaatcctttttcaagtttttttaacttctttgccatgggttcaaacttcctcctttagcttgccgtagtttgataatctgaagccttcttctctgaactcgtgaaagtcattctccatccagctttgttgcattgctgattagtagctgcattcctttggaagaggagtggtgctctgatttttagagtttctggtttttttgctctgttttttccccatctttgtggttttatctacctttggtctttgatgatgtgatgtacagatgggtttttggtgtggatgtcctttttatttgttagttttccttctaacggtcaggaccttcagctgcaggtctgttggagtttgctggaggtcccctgcagaccctgtttgcctgggtatcagcagcagaggctgcaaaacagsgaatattggtgaacagcaaatgttgctgcctgatcgttcctccggaagttttgtctcagaggagtacctggccgtgtgaggtgtcagtctgcccctacttgggggtgcctcccagttagggtactcgggggtcaggacccacttgaggaggcagtctgtccattctcagatctcaagctgcgtgctgggagaaccactatgccacttgttattttttcatgaaatttttatagtatgtttttctgctctatcaggttgattgtgttttttttctatactgactattttgtctttcagctcctgtatgtttttattgtgaattctagcttccttagattgggttttaatattttccaggatctcaatgatctttctttctatctatattctgaattctatttatctcatttcagccatctcagcctgcttaagaatgcttgcttgagaactagtgtgtttgtgtggaggaaggaaaacactctgattttttgaattgtcagagttcttgtgctggttctttcttatttttgtgggtctgttgtttcttcaacatttaaagttgttttttgggtgagagtttttcttttattctagttgataaccttgggcgatttgattatggtataaggtaggttcatttgactggcttcatttctggaacatttaaagtggccaagactcagctcagtactcctggattgcatgctctaactctgggggactggtatgaggtccccactttcttctctgacttttgaaggttaggaaccttctgggagggctgaggtcctcctggaccactagaagggacaaggtgctgccagatcactggtcataatacttcaatgggtaagtgccagccaaagaacttcatagggctctggcagcagtatctgcccttatttttatgtgccagttgcaactcccactgcagtatgtatgggtttatgctcctcagctgcagcacagtgctagcaggtaccagggtgctgacctttgtgagatcattcacagcaattggcaatattgactgcattgccttttgtgggccagtaggtggccatcatgcaggtgtttgcagttgttggttgcattgacagtatgactgggggcatagggctttctagcagcaactgtgcatacatttacactggtggcattgttatcatggaggtggggtgctctggttggcacaagtctgtgtgggccctctatgcatgttcctgtaggtggcagtggctactcagggtgagggtgggtccactttttgcatgcctagtttctgccggcagctgtttcagcactgaaagtaggtactgttgggggcagtgctgatgtgctttctgcttgccaatgatctgacaacaatggtggtgcagtggggggaagaggtagggtgcactcatgccaggagtagtggcatggcagggtgcacacaattatgtgtgctggtagagaagggaagacaaggtccacacacacacacacacacacacacaagtaccaataaagcaatgttggaggtcatcgtgggcgagtgcatgtaggcaaagtggcacaagggaggctgccgtagtggcagggtgttgcaggaagtcagggaccccaaacagaaggaccagctgaagccatggctgaagaacttggattgtgaagatttcgtggacatttattagttccccaaattaatacttttgtaatttcttatgtctgtctttactgcaatctctaaagataaattgtgaagatttcatggacacttatcacttccccaatcaatacccttatgatttcctatgcctgtctttactttaatctcttaatcctgtcatctcacaagctgaggaggatgtatgtcacctcaggaccctgtgatgattgcgttaactgcacagattgtagagcatgtgtgtttgaacaatatgaaatctgggcaccttgaaaaaagaacaagataacagcaactgttcagggaaaaagagagataaccttaaactctgaccaccggtgagccgggtggaacagagtcatatttctcttctttcaaaagcaaatgggagaaatatcactgaattctgtttctcagcaaggaacatccctgagaaagagaatgcgccccaagggtgggtctctaaaatggccccgttgggtgtggccgtcttctgtggttgaaactttagggatgaaataaatcccagtctcccatagcgctcccaggcttattaggaaaaggaaattcctgtctaataaattttgttcagactggttgctctcaaaccctgtctcctgataagatgttatcaatggcaatggtgcccgaaacttcattagcaattttaattttgccccggtcctgaggtcctgtgatcttgccctgcctccatttgccttgtgatattctattatgttgtgaagtaggtgatctttgtgacccacaccctatttgtatactccctccccttttgaacgtccctaataaaaacttgctggttttgcggcttgtggggcatcacggaacctaccgacatgtgatgtctcccccagatgcccagctttaaaatttctttcttttgtactctgttcctttatttctcaaactggctgatgcttagggaaaatagaaaagaacctatgtgactatyggggcaggttccccaataggagggtatgggctagctgggcttgtcttctgtggcaggtctgttccaggactttgcaggtcaggtgctatccacctgacaggtcaggaattgtgatgcagggccccaggaggtacttaggggctgcactgcaagcaggcaggatcagacttgggccctgggagaagccagcagaatgaggggtgctcagattggactggacctgaatcatgggcaaaaccaccctgcagatttcaggtctgacagttcccctagggcttaagtctcctgtgggagccagtctagcctaggggcatgggcaacccttgttgtgctcctccagatgttctggcatcaagtcttccaggctctgctccagcttgagttctgcccctaccacttctctgagcacctctccctgctaatccaagtgtccatggtggtcaagggtatttttccttctatgattctagaggcccatgtagaaagtgggttgctccttgactgttcaactcaccttttccccaggtgttgctgggagcaaggagcaagtcccagtgaacagtagccctgtgcagggttcccagcttcctccccattcagcccagcatctgtgtcttccctccatccaccctcaatgccttctctctgaagatctgctagcagtgtgccagtctttccaatgccccaaccctttgtgggagatgttccttctggctacatctagttggccatcttgcccctcaggagaaaacaactatttttatttaataatttttaaacattcttttctgtgactcttttaggaatgcccaattcttctggactcatgaaccgtcgtgatgccattgccaaaacagatgccactgtggtggcattactgaagggagctggtgccattcctcttggcataaccaactgtagtgagttgtgtatgtggtatgaatccagtaacaagatctatggccgatcaaacaacccatatgatttacagcatattgtaggtggaagttctggtgagttggacattttagtatggcatgaatagctatgctaacaataataattatgaattgtattaataaacatgatacagtatagcatctatgacctataagaatggatgcaaaaacccaggatatttgtgtgttgatggagaagaaatgggagtcatgtaacagccttggtcaactctgatattttgaagatagatagaggagaagtagccagcaaagggaattgagaatgaactacaagtgatgtagataggaaacatcgtaaagtgtttagagactaggaaaaaaaagtgtatagacactagaattgacaaggcttttattaagcctgaatggatgcatatgtgggttagcaaaatatgatgtttaaacttgtgggtgctaaagctacatagacatttgagacttcttttaatatatgaccttggtcacatgaagtaggtgctcattaagtcagttttctttgcttgtaagatggccatatgaaagaaatcagacttgtaaggttactgtgatgattaaaaatttaagtgtgacttcaggtttctggtctagcatatatggggtttagaagtttttactccaattcacacaataagaacaaaagctgaacaaactaaaagttaatgacaattcttaaatttatcaatatgctgaggtaacgggaaaaccactcttcccaaractgaatgaaaagacaggcagatacaaagaagtgaaacttgctagaacaaaagcctaggagcagaaaatttcaggggaaccagcacagctttagagaaacctaagctataactgatgacttgctggaggttcattgtgaaaaagtttgagaatcaaaatgtatgtggtggttgggtggggggatcttaggggccccacacaatttcaaaagttttaccttcaggagtcctactgtgttcctgagtgaagattggagagaaatcttctcttgcttcttgcacagggagggaaaaagtagccattttgaaattctgcttccaaagcatactgttcttctaacaaggaatgtcctcagagaaactattttttcagaacctaacttagtaaggttttacaagaaactaatggacttgacctaggggaaatgaaatatccaactccagtcctctctaggtttcctgtcctactgaaggggtcaaagcagaataaaattgggaagcacatgttagggtcacagagcaggggcacatgctaactaaatgactgagacctaatcatatgactataaaatacttcctctccttgtctccacacaccttatcactacacaaatagggattttctataatgggagttctatataaaccagaagaacagtacatcataggtgttatttaagaagtctctagggaaactcaaagacaacagaggaggtggaaacaatggcactagttgaaaattttacacctgacacctatggctacagcagacagtaaacacagactaacccctagccagggaaacataaaacctcacattaaaggccaaatacccccagttcttttatctcagtacatcatgtttggctttcaacaaaacaattataaggcatactaaaagacaaaatcacagtttgaaaagacaaagcaaccatcaagatttgactccaatatggaagagatattgaaattatcagactgagaattgaaaccatttgtgattaatatagtaagggctataatggaaaaactggtcaacatgcaagtacagatctgtaatgtaagaaracagatgggaacttcaagaatcaaaagcaaatgctagaaataaaaaaaaaaaatataacagaaatgaagaacatctttgatgggctcatcaatatattgtatacaaaacaggaaaccttcggtgatgtggaagatctgtcaaaaagaacttccaaaactgaaatgcaaagaggaagaaaaagattgaaaaagacagaagagactatctaataactgttggattacaaatgcatataatacacatatgtaattggaacactaggaagagaagaaagattttaagaaacagcaataaatgtttgaaaaaaactacacctagcataatatttcatccttagaaggttaaggagaaagaagaaaatatttaaagaagaaggagaaacataccttatctgtagaagagcaaagacagaattatattggtattttcttcagaagccatgcaaacaataagagatgggagtccactttgggaggccaaggcagttgggtcacttgaagttaggagcttgagaccagactggccaacatgttgaatccccatctctactaaaaatacaaaaattagccaggcctggcagcaggtgcctgtaataccagctactcaggagtctggggcaagagaattgcttgaactcgagaggtggaggttgcagtgagccgagatcatgccactgcactccagcctaggtgacagagggagattccgtctcacacacacacacacacacacacacacacaaagatgggagtcaaatatttaaaccactgaaagaaccatcaacttaaatctctgtctagcagatctattcttcaaaagtgaaaaagaaataaagatgctctgagacaaagacatattgacagaatttgttaccagtagagcaacagagcaagaaatgttaaaagatgttcttcagagagaaaaaaagaatacaaaccaaaaacctgaattaatgtaaaaaaaaaaagaaaatgattagagaaagattgaacaaaggtaaaataatgtatttttaaattattgattgctgtaacatgtaattgttcaaaataataatgccaacaatgtgttgggtgattatagcttgtctatgagtgaaatgaatgacaacattgttatatgggatgggataaaggaattgggaatgttcctttataagataactacactacttgggaggtggcagagtatcatttgaaggagacttgagttagttctaaatgtatattgcaaactcaagggcaaatattaaagtaacaaaaaagtatgcattaagtggcaagagaggagaataaatggaaacatttaaaaccagagacttagcctcccacacaattatagtgggagaacttaacaccccactgaaaatatcagacagatcattgagacagaaaattaacaaagatattcaggacctgaacttagctctggatcaagtggacctaatagatatctacagaactctccacccccaaacaatagaaaacacattcttttcatcatcacatagcacttactctaaaatttatcacataatttgaagtaaaacattcctcattaaatgcaaaagaacttaaatcataacaaacagtctctcagattacagtgaagggatgggttgcccctccacacctgtgggcgtttctcgttaggtggaatgagagacttggaaaagaaagaaagagacacagagacaaagtatagagaaagaaaaataagaaaaatgggcccaggggaccggcgttcagcataaggaggacccgtattattattgatcattatccagcgtttcccggagagggggatgtggcaggacaataggataatagtggagagaaggtcaacaggtaaacacgtgaacaaatgtctctgcatcataaacaaggtaaagaaaaaagtgctgtgcttttgatgtgcatatacataaacatctcaacgccttaaagagcagtattgctgccagcatgtcccacctccagccctaaggcagttttcccctatctcagtagatggaatatacaactgggctttacaccaagacattccattgcccagggatgagcaggagacagatgccttcctcttatctcaactgcaaagaggcgttccttcctcttttactagtcctcctcagcacagaccgtttacgggtgttgggctgggggacagtcaggtctttcccttcccacgaggccatatttcagactatcacatggggagaaaccttggacaatacctggctttcctaggcagaggtacctgcggccttctgcagtgtattgtgtctctgggtacttgagattacagagtggtgatgactcatagcaaacatgctgccttcaagcatttgtttaacaaagcacatcctgcacagcccttaatccatttaaccctgagttgacacagcacatgtttcagggagcacaaggttgggggtagggttacagatcaacatcatctcaaggcagaagaatttttcttagtgtcaggcctccgagcccaagctaagccatcatatcccctgtgacctgcaggtacacatccagatggctggttcctaccttaactaatgacattccaccacaaaagaagggaaaatagcctgttcctgccttaactgatgacattgtcttgtgaaattccttctcctggctcgttctggctcaaaagctcccccactgagtaccttgagacccccattctgcccgccagagaagaacccctctttgactgtaattttcctttacctactcaaatcctataaaatggccccacccctatctcccttcattgactctcttttcagactcagcccacctgcacccaggtgaaataaacagctttattgctcacagaaagcctgtttggtggtctcttcacacggacgcgcatgaaacttagtacagaacaaaatggagtctcttatgtctacttctttctacgcagacacagtaacaatctgatctctctttcttttccccacattacagcacaatcaaattagaactcaagattaagaaagtcatcccacaccaaaccacacaactacggggaaatcaaacaacctgctccggaatgacttttgacttttgggtaaataatgaaattaacaaagaaatcaagaagttctttgaaactaatgagaacaaagacacaatatatcagaatctctgggccacagctaaagcactgtttagagggaaatttatagcactaaatccccacatcaaaaagctagaaaggtctaaaactgacaacctaacatcacaactaaaagaagtagagaagcaagagcaaacaaatcccaaagctaggagaagacaagaaataaccaagattagagcagaactgaaggagatagagacacaaaaaatccttcaaaaatcaacgaatccaggagctattcttttgaaaaaaaaaataaataaataaaatagagcactagctagactaataaagaagaaaagagagaattaaatagacaaaatcggaatgataaggggttattaccactgaccccacagaaatacaaacaaccatcatagattactatatacacctgtatggacaaaactagaaaatttagaagaaatggaaaaaaattcctggaggcatacactttcccaagaccgaaccaagaaataattgaatctctaaatagaacaataatgagttctaaaattgaggcagtaataaatagcctaccaatcgaaaaaaaaaaaaaaaagcccaggaccagatggatttacakctgaattctaccacaggtacaaagaggagctgataccatttctactgaaattattccaaaaaattgaaaaagagggatttttttctaactcattttatgaggccagcatcatcctgataagaaaacctggcagagaaaaaataaaaatagaaaactttaggccaagattcttgatgaacatcaatgcaaaaaccctcaataaaatactggcaaacagaatttagcagcacatcaaatagcttatacaccatgaacaaattggtttcatccctacgatgcaagtttggctgaacatatgcaaatcaataaatgtcatttgttgcacaaacagaactaaagataaaaaacatgattatttcaatagatgcagaaaaggccttcactaaaattcaacatccctttatgttaaaaacttttaataaactaggtattgaaggaacatacctcaaaataataagatctgtatttgacaaactcacagtcaatatcacaatgaatgggcaaaagctggaagcattctccttgaaaaccagcacaagacaaggatgccctctctcactgctctgatacaacatagtattggatgttctggccagacaattaggcaagaaaaagaaataaagcatattcaaataggaagagaggaagtcaaactacctttgcttgcagattacatgatcatatatctagaaaaccccatcatctcagcccaaaagcttcttaatctgataagcaacttcaacaaagtctcagtttcatgaacgtccgtgtgaagagaccaccaaacaggctttgtgtgagcaataaaagcttttaatcacctgggtgcaggcgggctgagtctgaaaagagagtcagcaaagggagataggtgtggggccattttataagatgtgggtaggtaaaggaaaattacagtcaaagggggtttgttctctggcgggcaggagtggaggtcgcaaggtgctcagtgtgggagatttttgtgccaggatgaaccaggaaaaggactttcacaaggtaatgtaatcacttaaggcaaggaccgaccattttcacttcttttgtggtggaatgtcatcagttaaggcaaggactggccatttacacttcttttgtggtggaatgtcatcagttaaggtggggcaggacattttcacttcttttgtgattcttcagttacttcaggccatctgggcatatacttgcaagtcacaggggatgcgatggcttggcttgggctcagaggcctgacactcaggatacaaactcaatgtgcaaaaattgccagcatttctattcaccaacaacaggcaagtagagacaaatcatgaatgaactccaaatcacaattgctacaaaagaatacgatacctaagaatacagctaacaaggaaagtgaagaacttcttcaaggaaagctacaaactactcaaagaaatcagataggacacaaacaaatggaaaaaaaaaatccatgctcatggataggaagaatcattatcgtgaaaatagccatactgcccaaagtaatttatagattcamtgctattcctattaaactaccattgacatttttcagagaattaggaaaaaaaaacctattttaaaattcacgtggagacaaaaaagagcccgagtagccaagacaatcctaagcaaaaagaacaaagctggtggcatcatggtacccaacttccaactatactacagggctacagtaaccaaaacagcatggtactggtaccaaaacaaacacatagaccaatggagtagaatagacaactcagaaataagactgcacaactacaaccatctgatcttctacaaacctaacaaaaacaagcaatggggaacggattctctatttaataattcgtgctgggagaactagctagacatatgcagaaagttgaaactggaccctttctttacaccttgtacaaaaattaactcaagatggattaaagacttaaacctaaaacacaaaactataaaaattttagaagaaagtctaggcagtaccattcaggacgtaggcatgggcaaacatttcatgatgaaaacaccaaaagcatttgcaacaaaagcaaaaattgaccaatggaatctagttaactaacaagcctctgcaaagcaaaataaactatcatcagagtgaacagacaacctacagaatgggagataatttttgcaatctatccatctgacaaaggtctaatatgcagtgtacaaggaacttaaacaaatttacaagaaaaaaacattaaaaagtaggcaaaggacatgaccagagactcctcaaaagaaaacattaatgcagccaacaaacattaaaaatagctcaacatcactgatcattagagaaacgcacatcaaaccacaatgagataccatctcacaccagtcagaatggcaattattaaaaagccaaggaacaacagatgctagctagcttgcagagaaaaaggaatgttttacacagttgttgggaatgtaaattagttcaacctttgtggaagacagtgtagcaattcctcaaaaatctaggagcagaaataccattttacccagcaatcccattactgggtgtgttagtcagggttctctagagggacagaactaataggatagatttatacatgaaggggagtttattaaagagtattggctcacaggataacaagttgaagtcccacaataggccgtctgcaagctgaggagcaaggaagccagtctgtgtcccaaaacctcaaaagtaggaaagctgacaatgcagcctttaatctgtggccaaaggcccaagagcccccggcaaaccacttgtgtgagtcygagcgtccaaaagctgaagaacttggggtccgatgtttgaggacaggaagcatgcagcatggaggaaagatgaatgctggaagacacagcaactctgctctttccaatttctatctgctttattctagccacgctgattagatggtgcctgttgtgactggggatgggcctgcctctcccagtccactgactcgaatattaatctcctttgcaacactctcacagacacacccaggaagaatactttgcattttttgattcaatcaagttgacgctcagtattaaccatcaaactgggtatatacccaaaggaatataaagcattttattataaagatacatgcacacatatgttcattgtagcactattcacaatagcaaagacatggaatcaacccaaatgcccatcaatgatagattgaataaataaaatgtggtacaaatacaacacggaatgctattcagccatgaaaaggaacaagatcatgtcctttgcagggacatggatggagctggaagccattattctcagtaaacgaatgcagggatagaaaagcaaacacagcatgttctcacttataagtgggatgggagctgaatgattakaacacatagacacatggtggggaacaacacacacttgggcctgttgggggatgttgggagaaaggagagcatcaagaagaatagctaatggctgctgggcttaatacctaggtgatgtgttgatctgtgctgccaaccaccatggcacgcatatacctgtgtagcaaacctgcacatcctgcacatgaaccccagaacttaaaagttgatggaaaaaaaaaaataagaactcttttctatatgagagaattaagaaaaagcagacacacaaacacagacccggggaagaaatatcctcagggaaaaccttatcagtaattactttaaaatgtaaatggcttaatattctcaagtaatatagatgaatagaataaaattatgatctaaatatatgctgtgaacaaaagactcactttggatctaaagacacaaaaaggttgaaagtgaaaagatggaaaaagatattccatgcaaatagtatattagattatttatttgcaagtattttgtgtttcttgtaggtggtgagggctgcacactggcagctgcctgctcagttattggtgtgggctctgatattggtggtagcattcgaatgcctgctttcttcaatggtatatttggacacaagccttctccaggtaatgttaatatgatcagaagggtggttctacttttataattcagagcaattcagaaattttgttctagcaggattatcttgyttatcagggtgattattatatatttctcaatgttcttaaataaaactagctactgtttattgagcaccaactctgggattggtgcacaaaattgtgcaaggctttcctataactaatgtctttcaatagttataatagttgtttttttttttttcagaaagttatccccaatttacaaatgacaaattcaaagctcagaaagattaaataaaccggctccaaattaaatagttaaacaagtaaatcatagtgctaggattcaaacctacttggattacaggaggctgttttctatccactgtactaaaatgacttatcagttaaatttgattttccctcatttaaagggtaaaataacacagtttcagaaacagtggaaagaaaaattctgtcacctagaaactccagttattggcatttactgttttttcaatgaattcaaggagtatttattttgtattatttatggtggtaagaatgtcaaagcagactccctgcattcaaggaacttaaaatcttctaggctttcaaaaagtgatttaaaggtaatataaggtagtctaataaatataattgtggtatagtaaagcagaatattttgaactttagattaatcataaaaatatgctaagaataaatcctcatttgatcatggtttttaggaatcagtactataacaatggtccgtatacaccatggaatgctatgtagccatgaaaaagaacaagatcatttcctttgcagggacatagatggaactggaggccattatccttagcaaactaacgcagraacagaaaaccaaatgtgacatattttcactcataagtgggagctaaatgttgagaacatgtgagcacatagaggggaacaacaaacactggggacctttcagagggcagagggtgggaggatggttaggatcaggaaaaataaataatgggtactagtcttaatacctggatgatgaaatagtctgtagaacaaacccccatgacacgtttacctatgtaacaaacctgcacatgtacccctaaacttaaaagttaaaaagaaagataaatcctagctcttcatgactttaaagaattacgcacaaaaagagtactgaaaattggcctgctaggagttgacctattttttttcccttccatattttattctacgttcagggggcacatatgcgggcttattacatgggtaaattgtgtgtccatgtggtttggtgtacaaatgatttcatcattcasgtagtgaacacagtccctgataggtagttttttgatccttgccctcctcccatcctccacctttaagtaggctctggtttctcttgttttcttctttctgtccatgtgtactcaaggtttagttccacatacaagtgagaagatgtggtagtttcttttctgttcctgtgttaattagcttaggataataatggcctctagctgcatccatactattgcaaaggaatattttattcctttttatggctgcatagtatttcatggtgtaaaggtactacatattctttattcagtccactgttgatgggaagctggattgattccatgtctctgctattctgaatactgctgtgataaacatatgagttcatttgtctttttggtagaacaaataattttccttggagtatatatctggtaatgggatcactgggttaaatggcagttctaagttatttgagatatctccaaactcctttccaaagggctgaactaatttacattcttaccaacagtatataagcattctcttttctctgcagcctcatcagtgtcagttayttttggattttttcaatgattgccattctgacttgtgtgagacagtatctcattgtggtctttatatgcatttctctgatgattagtgatgttgatcattttttataggtttcttggctgcttgtacatcttcttttgagaagtgtccattcatgtcattttctcactctttaattgattatttactttttgcttgttgatttctttaagtgccttatagattctggatattagacttatgttggatgcatggtttctgaatattttctcccattctgtagactgtatgtttactcttttgataatttctttcgctatgctgtagctctttagcttaatttggtcccacttgccaaattttctttgaaattgcttttggagacttagccataaattatttgctagtccagtgttgagaagggtatctcctaggctttcctctagcatttttataggttgggatcttacatttaaatatttaatttatatttagttaatttttgcatatggtgaaaggtagggatccagttatatttttctgcatatggctggccagttatcccggcgccatttattgaataggaagtcctgttacccttgcttttgtaaattttgtctaagatcagatcgttgtaggtttgcagctttatttctgggatctccattctgttccattggtctatatatctgtttttataccagcttcatgtggttttggttacattagtcgtacaatacagttttaagttgggtaaagtgatttatttgccttttgtttccttaggatccctttggctgttcagatgtattattggttccatatgagttttagaatagctttttttttttttaaattctgtgaaaaataacagtatttcgatagggataacattgaatatgtaaattactttggaaagtatggcaattttaatgatattgattcttccaatccatgataatggaatatttttctgtttgtttcatctcatattttttcagcagtattttgttgttctttttgtaaagatgtttcacctctttggttagtggtatttctagatattgtagttttggtgtggctattgtaaatgggattgcattttttatttggcttaccaagaatattattgaagtgtagaaatgctactgatttctgtacatgaattttgtgtcctgaaactttactaaagtcatttatcaattccaggagccttttgggagagtctttttgaatcatattgtcagcagagagagattgactttgtctttgtcctatttgaatgccctttatttctttctcatgcctaaatgctctggctagggcttccagtattatgttgaataggagtggtgagactggacacctttgtcttactgcaggtctcaaggggaattattctgtcttttgcccattcaatatgatgttggctgtgggtttgtcataattagctcttattattttgatgtatgctcttttgatgactattcttctaaggtttttatcatgaaggaatgtttgattttattgaagtmtctttctgaatctattgagatgattatatctttttttgttttaaattctgtgtatgtggtaaatcacttttttttatttgcttatgttgaattaacattgcatcccaggagtaaagcttactcaactgttgtgaattaacattttgatgtgctgctgaaataagtttgctagtattttgttgaaattttttctgtctgtattcatcagggatatagtcatgacttttgttgttgtgtctgtgccagattttggcatcaggatgcttgatttctagaatgagttaaagagcatcctctcctcaatttttttttttttttggaatagtttcagtagtattggtaccaggttttctcccttcccttcccttccctcctctcccctccccttcccttccctttctttttgcattcctggtagacttcagctgtgaatccatctggtcgatgtcttttgtgcattggtaggttttttttaattactgaattaatttcgaagcttgttatttgtcttttcaagatttctctttcttcctggttcaatcttcagaggttgtgtgttttcagaaatgtatccattttttctagattttctaatttgtgtccatagaggtgttcataaaaaccactgaggatcttttgtatttctgtaggatcagttgtaacttcacctttgtcatttctgattgcatttatttggactttttttttctttgttaatctagccagcagtctatcttgtttattccttcaaaaaagagactcttggttaaattgatcttttgtatgaacttttgcatgtcaatttcattggttctacccaattatagttacatattttctactgcaagctttgagtttggattgcaatttattttctagttcctttgggtgtgattagatcactgattttagatctttctaactttttgattcaggcttttaacatcttaaactttactcttaacagtgcattacctgaatcacaaagattttggtaagttattttttattttcattaacttataataatcttttgatatataccttaatttcatcgttcacccaaaagttattcaggaaaaagttatttaatttgcatgtatttgtgaatttttgaaatattttatttatattggtttctatactttttgcactctgatccaagagtgtgtttggtatgatttaaatttttttgaatttattgagacttgctgtatgaccaaacttgtggtcaatcttagaatacattccttgtgcagatgagagaaatatatattccatgattgttgggtggactattttgcagatgtctatcaggtgcaattagtcaaatgttaaggttatatccttcatttattggttagttttctgcctcaaagatctgtctaaggctgtcagtggggttttgaaatctcccactattattgtgtggctaagttttttcttaggtcaaaaagaacttgttttatgaatttgagtgctccaaattgggtgcatgtatatataagataattcagtcttcttgttgaattgaatcctctatcattatattatgcccttctttgtctttcctgattgttgttggtttaagatctgttttatcttataaaaagatagcaactcctgcttttcttgtttgctatttgcatggtaagtttttctccatcgcgttgctttgagcctttcagtgttgttacatgtgagagaaattccttgaagagagcagatggttgcctttttagtttggtgtttagaccatttacattcagggtcagtattaatggatgagattttgattctgtactcatgttgttagctagttgttttgtagacttcattgtgtaattgctttatattatctgtgggctatttgcttgaattgtttgtggtagcaggcatcattcttttgtttctatgtttggcactcccttaaggaccccttttaaggttggtctggtggtaacacacttcatctgggaaggactttattttttatttatgaagcttagtttgccaggacatgaaatccttagttggaatttcttttctttgaggatgctgacaatacacccccgtgtcttctgcctttaaaggtttctgctgagaggtgtgctgctatcctgatggagttctctttgaaagtgacatgaccttttcccttacttgcctttaaggattttacttttcccattgaccttggtgaatctgatggctatgttccttgtggatggtcatcttgtatagtacctagctggagttctctgtatttstttgatttgcctgtcacactctccaataagattaggaaaatttttatggactatattttcaaatatattttccaagttaattattctctctcctctctcaggcatgccactgatgcatagattttgttgctttacataatctcatatttcttggaggttttgtatattgttcttatttgtttttctttatttttgtctgactgagttgatttgaaaaactagtctttgagctctacgaatctttcctcagcttggtctattctgctgtcaatacttcctactgtattatgaactttttgtagtgaaatgtttaattccaggaggtctgtttggttctttctttaaatggctgtttcatctctcagttcttagatcattttaatggattccctggattccttggattgggtttcaactttctcctgaatctcgatgagttttctttccattcagataatgagttycatatctgtcaaaaaggctagtttgtttatttggaggtaaggggatgctaagtttttttttttttttttttttttttttttttttgctgttgttgttgttttaattttcataattcttgcacttattctttctcctctgagggggctggtgttcccttaactgtgttgaaagctgattatagtcagttggttttaattctgtgtgctttcaggagaccagggctctttataagatctttattagtgattggatttttgccttgggtttctcaggcactgtatactggcaaaaaattttttgatgttgttacttaggctgtaatctagtaaatggcatataatggtaatggctggtagataggcgcttactcaacaacgtgactcttctgcatttctgaatgttcatagtagttatctgtggtttgttggagagaaatgacctcattgggtctgattctaggccttggtggaacatcctctgatcactagtgcagtgcctacatttcctattttaggtgctccaggctgcagaccttccctgcactcaccattgaaggacataagtgtaagcccacaggtccagctttgcctttgcctcagagaatgcatggttcgggatcctgcagattgcacaaccccatccaccacttgaggcacctgagcactcttcctagggaactgagatttggcctaaacaccctgcaactaccacgtcaactggcttctacttggaagtgttagttgctggcccaaaaagcccatcacgaccactgccaacatgagcacataatgcttgggaaccagaaggacatcttacattgctattgctattgactacactatgttgactgcacaggggcttaagagcccactttcctacttagttcactgataacacaattgccattcaagaaagacacccaggggcccaagaattggcccacctggaaccaccaatgtgggtaccagtgtacaccaccccttggcacgaggatggatgctcttagctaccactgtgaccgctgaagcctgaagacaggcccaactggtgtcagtccctagcacagctttactaaagccttcactaacaagcatacccaaacacacagaaggaaaccgcagatagctctttacaaccaaaaatactatacagagatttaactgctgcatgcgtcttgagccaaagccaaagggctcaacacaaccaacattatagaaacaccttcaggaaaaagtctcccctaaggaaagtaaatttaaaaatagaagtgattgttacaccagatgcagagatgtcaacataaagacacagaaacataaaaaagcatggaaatatgacacccctaaaggaacacaataattcaccagcaagagattcaaacaacagaaaaaaaatctcaaaatgccatttaaagaatccaaaataaagacgctcagtgagatgcaagagaagtctgaataccaatacaaagaactcagaaaaacaaatcagtgtataaatgagaaatatatatatatattatatatacacatatatatattatatatataatgtatatgtgtataatatatacacatatatatattatatacatatatatgtataatatatacacatatatatgtatacatatatgtatatatacatatacatatatacatatatatgtgtatgtatgtatatatgtatgtatatctgtgtgtatatatgtatatacatatatacatatatacatatatacacagatatacatacatacatatatacatatatacacatatataatgttttatacacatatatattttaaatgttttatatatatctattttaatatatatgtatatatgtgtgtatatacacatatatacatatatatacatatatacacatagatacatatatatacatacatgcatatatacacatatatatacacatatatacatatatacacatatataatgttttatacacatatatattttaaatgttttatatatatatatctattttaaaacaggaattctagaactgaagtattaatttaaggaaatacaaaatacattcaaaagcttcaaaaatagactatacaaaatagaagaaaaacacttacaacttaaagaaaggtcttttgaaataattcttttggacaaaaataagagaacaaagaattaaaaaaaaccaaggcctccaagatctttgggacaacataaawcaactgaatatgaaagttattaatattcctaaatgtgaggatagatcaaagcttagaaaatgtaatttaatgaaataacagatgaaaacttcccaagtctaccaagaggtttagacatccaaacacaagaggctcagtgatccaaagaaatagaatacaaaaaatcttcatcacagcacattataatataactgtctaaagtcagtgtgaacaatgatttttaaaaacagcaagagaaagtcatctatttacctattaaagaaaaactatccaactaacaatgaccctctcagcagaaacttcaaaggccagaaaataaatggatgatatgttcaaagtgtagaaagaaaaacaaccctgctgacggtgaatactatattcagcaatacttgccttcataaatgaagtataaataaagtctttcccatacaaatgctgagggaatttgtcacgattagattggccctacaagaaatgctcaagaagtcctaaacatgaaagcaaaaggacattaaccattatgaaaacacatgaaagcaaaaggacatttaccattatgaaaacacacaaaaatagaactcactagaaaagcaatcacacaaaaatggaagagaaaggaatcaaatggcactactacagaattccaccaaaccacaatgacaaacaacgtgggaaaaaaaataacttatgaaacaagcagaaaacagttgacaatatggcaggaagaaaacctcaattgtcaataataattatgaacataaacatattaaaatctcaacttaaaaaatacagattgacaaaatggtaaaaaacgatctaaccaaattcttcttacaagaaagttactttattttaaaagaactattaactgaaagaaaaggggtagaaaaaatggtccttccaaatgaacatcaaaattgggcaggagtagctacatttttataagatcaaacagacattaagtcaaaaacaattaaaaaggtgattatataatgataaagaaatcaattcagcaagagaatgtaacaattctaattatgtatttacccaacattggagcatccaaattgataaatatcactagaccaaaagaggagatagattgcaatacaataataattagggatttaattctccactcacaatattaggcagattgtcaagacaaaaattcaacaaagaacatttgttgtaactaggctataaatctaaatggatgtaatagatatttagagaacattcttcctgacaactgaagaatatacattcttttcatcaacacatcgaacattctccaatatgaaccacaggataggccacaagaaaaagcttcaacacaatttttaaaaattgaaattatatcaagtatcttttcagaccacagtggaacactactagaaattaataccaacaggaactttagaaagtatacaaatatatggaaagaaaacaacatgtttgtgaatgaccattgggtcaataaagaatttaagatggaaagcaaaatatatttgaaacaaaaatggaaatgcaatgtagtaaaacttgttggttacagcaaaaggagtgttaagagagaagtatatggtaataaaggcttacgtccaaaaaaagtacaaagattacaaagtaacaatttaatgatgcatattaagcaactagaaaagcctgaactaatcaagattacatttagcagaagaaaagaaatagcaaatattaaaacagagctaaatgaagttgaggctaaaaacataatacaaagaatcaatgaaatttgaagttggacagataaagaaaattgatcaactgtgagctaagctaacaaaaaaggaagaagacccaaataaacactgaaatgacaaaggaaacattgaaatttataccacagatataaaaaaagattattggagactattatgaaaactgtatgcttagaatctagaaaacctatcagaaacagatacatttctggaaacataaaatctattgagattgattcaggaagaaatagaaaatctgagcagacaacgaatgagtaatgagcctgaggctgctatagagtctcaaaacaaaaacaagccaagaatggattattcacagctgaattctaccaaataaataaagaactataccaatcatactgatattattccaaaaacttgaaaaggagtgaattaattccaacttcatcaaggccaggatcaccctgataccaaaacaaaataaggaagcaaatatatgtgtgtgtgtatatatatatatatacatatatatatgtgtatatatatatatatacacatatatatatgtgtatatatatgcacatatatatatatgtgtatatatatgcacatatatatatatgtgtatatatatgcacatatatatacacatatatatatatgccaatatttttaatatagctagacacaaatatcttcaacaaaatactagcaaagttgaatctaacaacatgtcaaatagaccacatactatgattaagtgggtgttataccagggatgtaaaaatggttcgacataggcaaataagtaaatgtgatatatcacatcaacagaatcaagaacaaaaaccttgttatcatttcaattgtcaaagaaaaagcattcgataaaacttatcatgccttcatggtaaaaaaatcaaaaaactagccacagaagcaacatacctaaaaataataaaggccacatatgacaacccaccaggtaacatcatactaactggggaaatgctgaaagcacttcctctaacaactggaacaaagcgagaatacccatgtttgctacttttcaatgtagtactggaagtgataacttgaacaaccaggcaacagcaataaataaaagacatccaattagaaaaagacgaagttaaataatctctgtttgccaaagatataatcttagatatagaaaaaccctaagaacttcaccaaaaatatttaaatttgataaatgaattcaggaaaggttcaagatacaagaatcagcacacaaaatcagtataatttatatgtgctaattatgatctgagaaagcatgaaggcaatctcatttatgatagttacaaaaacaaacaaaatacctgcttataaatttagccaaggaggagaaagattactacaaagaaaactacaaaacacagataaaagcaattgaagatttcaaaaacaaatggaagaacattctatgctcatacgtcagaagaattaatatcattaaaatgaccatattacacaaagaaatctacagattcagtgcaattcctatcaaaataccaacatcattttcacagtattataaaaaattaaaatttatatggaaccaaaaaagaaccctaataactaaagtgttcctgagcaaaaataaaaaagctagaatagtgcattacctcacttcggtaatattatgaggcgacagtaagcaaaacaacatggttctggtaaaaaaacagatgcataggtcaatggtacagaatagagaacccagaaataaagccacataaatacagccaagtgatctttgacaaaggcagcaataatatacattgtggaagtgaatcacttttcaataaatggtgctgggaaaattggatagtcatatataaaagaatgaaactagactactttattttgtcatatacaaaaatcaactcaaaattaattaaaaacctaaacagaagaccccaaattattaaaaaaaaaaaaaaagaaaaaaaagaaaaccaaggggaaattattttggacatctgtctaggcaaatactttatgactaagaccacaaaagcacagtcaatagaaacaaaaatggacaaatgtgacttaattaaatttaaaaccttttgcctagcaaagatgtaatcaacagagtgatgaaacaacctgttgaatggaagaaagtatttgcaaattattcattcaactgaagacttatattcagaatatataacaagctcaactcaacaatgataaaacatttcattcacaactgggcaaaggacataaacagacatttttcaaataaaagatatacaaatggccaatatgtatatgaaaaacgctcagtatcactagctatcagagaaatgcaagtcaaaaccaatgtgagattatatcttactccagtcagaatgggcattattacaaatacagaaagtaacagatgttggcgaggatttggagamaaggaaatcttacacattgtgccaatataaacaagtgtagtctgtgaaaaacagtatggaggtttttcaaaggggtaataatagaactactatttcatctagcaatctctctactggatagctacccaaagggaaakcaattatattaaaagctacctgcacttgtatgtttatacagcattattcacaatagcagagatatggaatcaacctaagtgttcatcaacatatgattggataaataaattgtggtatatatacacaatggaatactattctgccatatgaaatcatgtcttttgcagcaacatggatggaactgacatcattatatttagcaaaacatgcccgttacagaaagataagtattacgtgttctccccaataagtgggtgctaaaaacgttttttacatggatgcagagagtagaatgatagataatggacactcagaagggtgaggctgagagagtggaacacgattagaaatttgttaatgggtacaatgcacattattcaggtgatggataccctgcaagccctgatttgactgttatgtaacctgtgcatataccaaaactgcacatacatctcataaatttgtacaaaactaaaacccactgaattacttcagtggcaaatctgtcaccaagtttgtctgtgttgtcatctaagtaaacctttgttaagtatacataaaaatcttgtactttatgaatttaactatgtaaaaagaaaattgagataaaaagactaagggaacatatgaaaatattaattatgagtattttttgctaatgagattctaggtaaatttaatttttattcatttcagtattttccaaattttccataatatatgtatgcttttttaaaaaattagatgctaatttttaaaatattaatatgtctagtttgatatgtcttgtgttcacattttaaaacatatacacagcaaaaggactgaacagagtgtaccaaaatgtttatctggctagcactgccaggaatttgcgttcattttcttcttacttttttatcaaatattctctactaagtaggtattacatttatacaggaataaacatttttttgaattcgaattgtaactatgcctgttactaaatatgcacttttgttattttaaataacctccagagtctcagtttccccayctttgaaaatgagataatacttacctcttaggttagttctgaatacaaaaacatgtgttggttaaacatgtgccaaaattgtttgtttctaaaatttaaaattggcttctttgtctttttttttagtaagataacagataaaaatgaaattagtctatttttctacttgccagcagaatatctgtcttattttagggaacaatgtgaaatttaccatttatattaacaattaggtgtcaacccatgagaataaaacacatttctaagggaagaaaaaataatccatggacatgaaatgccattccatgtatttatgctttatttcagcaatggtttgtagttttcaatgtacaaatatttttcctctgttgttaaatttgtttctattttactccttttcatgccattgtgaatgggattgctttcttaatttcattttcagattgttcattattagttcattgaagtgtaactgatttatttttttttaataactattaacttcttcgaattcatttttaaccattagcagtttctctttatggactctttagggttttctacatacacgatcatgcaatctgcagaaataacttcatgtgttcctttcaaattttgttgtcttttatttatttttgtcacttaattattctgactagaactttcagttttatattggatagatggggcaagaatagtcattccttctttgttcttcattttagatgaaaaattttcagtctttcaacattgagcatgttagctttgaacttttcatatatagcctttattatgttgaggcaattattgtctattctttatttgttggcttttttgtcatgaaggagggttgaattgtttcatatgattttctgcatcaattgagatagtcatctgggttttctcttaattttattaatgtggattaatacattgattttcatatttaggacaattgtttcattccagcaatacattttacatggccactcttgtaatgtgttcttggattctattttactagtagtttgttgaatatatttgcatccatgtttatcagggatattggtctatagttttcttgtagtaacagtatatggtttggtatcagggtaacrctggctttgtaaaatgagtttggaaatattatattcaatttttggatgaatttgaagatgattagtattatttaaaaaaaaagttagatagaattcttctgtgaaggtatctgttcctgggatttcctgtgctgtgaagttttaaattactgattcaatttctttactagctataggttctttcagattttttctctcttcatgattcactcttagtatgttgtgtgtttttaataatttatagattttctctaggttaccaaatttattgatctatattttttaatgtattgctttataatactttttatttctgtggcatcatttataatgtccgctcttttatttctgtttttagttacttgaggtttctcttttttcttagtcaacctagctacaagcttgtcaattttgttgatatcttactaaacccagttcttaattttgttgttttttctgttgattttttaacttactaaattctattttatttatcactgctttaattttaatttttattatttatttattttaattattatacgttaagttctgggatacatgtggagaatgtgcaggtttgttacataggtatatacgtgcaatggtgatttgctgcacctatccacccgctagctacattaggtattttttctactgctatccctcccctagccctccaccctctgacaagccctgatatgcgatgttcctctcactgtgtccatgtgttctcattgttcaactcccacttatgagtgaaaacatgtgatgtttggttttctgctcctgtgtttgtttgctgagaatgatggtttccagatttcctatttaataaatggtgctggtaaaaccggctagccatatgcagaaaactgaaactggaccccttccttacaccttatacaaaaattaactcaggatggattaaagacttaaatgtaagacctaaaaccatgaaaaccctagaagaaaacctaggcaataccattcaggacataggcatgggtaaagacttcatgactaacacaccaaaaacaatggcaacaaaagcctaaattgacaaatgggatctaaataacctaaagagcttctgcacagcaaaagaaactatcatcagagtgaacaggcagcctatagaatgggagaacatttttgcaatctatccatctgacaaagggctaatatccagaatctacaagaaacttaaacaaaatttacaagaaaaaaacaaacatcctcatcaaaaagtgggcaaaggatatgaatagagacttctcaaaaggagacatttatgcagacaacaaatgtatgaaaaaaagctcatcatcactggtcattagagaaatgcacatcaaaaccacgataagataccatctcatgccagttagagtggcgataattaaaaagtcaggaaacaacagatgctggagaggatgtggagaaataggaatgcttttacactgttggttagagwgtaaattagttcaaccattgtgaagacagtgtggtgattgctcaagggtatagaaccagaaataccatttgacccagcaatccttttactgggtatacmcccaaaggattataaatcattctactataaagacacatgttcatgtatgtttattgaagcactgttcacaatagcaaagacttggaaccagcccaaatgcccatcaatgatagactggttaaagaaaatgtggcaaatatacaccatggaatactatgcagccataaaaaaaggatacgtttatgtcttttgcagggacatggatgaatctgctctactttttattatttctttccttcagataaggttggctttatagtgttcttctttgcctagtcccttgaggtgraaagttaggtagttagtttgagatcttttttttttttaaattttatttaaaaaattgtattgtattttggtaagaacatttaacatgacayctaccctcttaactgatttttaagtttccaaacagtagtcttcatttgggcacaatactttacagcagatctctagtatttattcatcttgcataaccaaaactttatatcacatgaatagcaattcyccatttctccctttctccatctcctgacaatcatcatttcactstctgcctctatgagtttgacaaatttagataactcatataagtggaatcacacagtatttgtccttctgttttatttagcataatgtcctcaagatgcatttatagtgctgcattttgcaaggtttccttgtttatgaaggctcaacaatttccattatatatgtatgtgtgtgtgtgtatatatakagagagagagtttctcaacctgttcatctgttgatggacatttaggttattcccacctcttggttattgtaagtagtgctgcattgatattcagaatgctaaatctctttgaaattctagaattcaagatctgagtatttaggtggataaatatctagaagtgagattgctggatcatgtgaatctcctatttttacatttttgggggatcttcataatgtttttaatggaggctgaacctttttgcattcccagcaacagtacaaaaatttctgattcctctacatccttgtcagcacttgtgagttattttttatttttgtgggtacatagtaggtgtatatatttatggggtacatgagatattttgatacaggcataaaatgcatagtaatcatatcagggtgaatgggattttcatcacctrtagcatttatcctcttcttgtgttacaaacaatccaattatactctttcggttatgtttaaatgtacaatatattactgttgactgactgtagtcacactgttgtgctatcatacactagatcttatttattctatctaactatgtatttgtacccattaacaatcctccctcccctcatccttcactacccttaccagcctctggtaaccatgattttactcctaagagatcttccttcttctttaatgtaaatgcttactgctacataccaacctgtttatatagcttttgctgcatcccatatgtttaggtatgttgtaatttaatttgtcttaaggtattttctaattttcattctgatttcttctttcacttgttggttgtttgagtatattgttaaatttccagtcttcatggattttctagtttcccttccgctattgatttctagttttattccaatagattggaaatcatgttttgtacattatttaggcctggccactgcacctgtcccaaataatatatattttagctgacaacaaattaacttcaaccacatatgaaaactttattcttgtacatatctgcccctctttatgttattgatgtcaaaattatattgtgcatctggtatcatagattcatagttattttcatgtttttgtcctttaatctccataccagaattagaagtgatttataaaccaatattatagtatcacaggatttaatatctgtctgcgtatttacctctrccagagatctttgttatttatggttttatgttgctaacaagtgtcttttgatttcaacttgaaggactccttttggcaattcttgatggcaggtgtaaaggggatgaaaaacctcagtttatgtttatcttggaaggtcttaatttttccttcagttttgaagaacagttttgctgaacatagtgtttttatttttcagggtgtttttttttttttctcagccctttgaatatatcattccagtcctttctgtactgtaaggtttctgctgggaaatatggtgatagtcttatggaaacttctttctgcacagtgwgtagctattctcctgctacctataagattctctctttatctgtgatttttgactgcttgattataatttgtcttggtatgagtctgcttgggtttatcttagagtttcattttttagcttttcccatttttrtgtaactttcctcaaaattgagaagtttttggccttctttcttcaaataattcctcttcccttttacttttttatgggtatttcatatgcatacatttgtccggttgatggtgtcacatgagtttcttagactctcttcactttccttcatttgtttcttttttgctcatctgagatgaaaattttaaatgacctattttaaggtttgctaattatttgttctgcttgatctagtctgcttttgtacccctctaccaaattttgcaattccattattctattcttcagcctcagaacttagttttttaaaataggttctatctctttattgatattctcattttgtctgttttctcttttagttattgagcatttttaagatggttattttgaattctttatcagataattcataaaccctttttaaaaattgttttcttgtttttaaattttcttaattttactttaagttctaggatacaagtgcagaatgtgtaggtttgttacataggtataggtgtgccatggtggtttgctgcacctatcaacccgtcatctaggttttgagacccacattcattagctatgtgccctagtgctcttcctcccctcacccccacccaccgacaggccccggtgtgtgttgttcccctccctgtgtccatgtgttcttattgttcaactgccacttatgagtaagaacatgcagtgtttggtcttccatccctgtgttagtttgctgagggtgatggcttccagcttcatccacgttcctgcaaaggacatgatctcattcctttttatggttgcatagtattccatggtgtatatgtaccacattttctttatccagtctctccctcccttctccataawtttttggataatttgagtagaattataattagttctttcttaaatatttgatagaattcagcagtgaaaccatcaggttactgcttctatctcattactcataattagtttgctcagattttttatttttccatggctcaccatcttargttatatatgtaaatacttttttttagtttttcaaaattactggcatatagttattcataataacttctttctttctttctattaatttaaggtttggcatgttgttgctcttctagttctcaaaggtgcagcatgaggttgtttataaactctttctacttttttgatatatgcatttatttctataaactttcctcttagtacaactactaatgtatcccatgggttttgatattttgtatttccattttatttttctgtcaagaaattaagattttttcctaaatttctttatttacttattgtttgctccacagcatgctatttaattttcatgtatttgtttagtctccaaaattcctcttgttattgatttccagtattatttaattgaggtcaaagaagatatgtgatattatatatatatttttttaaattgtaagactttctttgtagcccaatatgtgttctctcttggagaatgtccatgaaatgatgagaaggttgtgtattttgcagtcattggataaaatgcatccttttctctcagattgaacaattccctttagtgtttcttatatgacagttctagtggttatgaaatccctcatcttgtttgtctggaaaactcattatatttttttcatgtttgaaggaaactctggtaggcacaatagtctaagttcaaagttttttttccttcattattttgaagatagcatcccactctcctcttttctgtaagatttctgctgagaagtttgctttcagactatcagagctcctcataagttatttgctccatcttaccgattttatggtcctttctttgttcttgaccctagagtttgatttttttttcaaattttattttaagaacaggggataaagaaaatgtggcacatatacatcatggaatactatgcagccacaaaaaaagatgagttcatgtcctttgcagggacatggatgaagctgcaaaccatcattctcagcaaaataacagaagaacagaaaaccaaacaccacatgttctcactcataagtgggagttgagcaatgagaacacacggacacagggagaggaacatcacacactggggcctgtcggtgggtgggaggctaggggacagatagcattaggagaaatacctaatgtagatgacgggttgatgggtgcagcaaaccaccatggcacgtgtatacctatgtaacaaacctgcatgttctgcacatgtatcccagaactggatattaggcctttgtcagatacatagtttgcaaatattttctctcattttagaagttttctgtttactctgttgatggtttcttttgctgtgcaaaagctctttcacttaattatgtcctacttgtcaaattttgtttttgttgcaactgcttttgggtacttagatataaattttttccaaaggatgatgtccagatggtgttttctagattttcttctatgatgtttataagtttagtcttacatatgtctaatcaatcttgagttaagttttgaatatggtgaaatgtattttgcacatgactagccagttatctaaacaccatttattgataggtacttcattccccattgcttgytattgtcaactttgtggaagaccaggttgttatagatttgaagctttatttctgggttctctatcctgttccattggtctaggtgtctggttttataacaatatgatgttgcttggttactgcagccttgtagtataatttgaagttgaataatgtgatgcctccagctttgttctctttacttaaaattgctttggctattcgggcttttcttggttccatatgaattttagaatagattattctaattctgcaataactcacattgagagtttgatggggatagcaaggaatctgtaaatggctttgggaagtatggccattttaacaatattaattcttcaaattcataggcatagaatgttttactttttttgtcatctctgatttattttagcagagttttataattctcaaactagaaaactttcacctccctggttagctatattcctaagtattttattatctttgtggctatcataaatatattacattcttcatttggctctcagcatgaacattattggtgtataaaagtactactgatttttgtgcattgattttgtatcctgaaactctaagtagtttatcaattctaggagtcttttggcagagtgtttaggactttctatgtataagactatataatctgtaaagagaaataaaatgacttcctttcttttatttggatgcctttttttcttactcttgcctgattgctctggctaggacttcccagcactatgttgaataggagtgatgagggtgggcacccttgtctttttccacttctcaaggggaacacttccagctttagtcaatttaggataacattggctgttagtttttcaatgatggttcttattattttgaggtatgttctatggtgcctaatttttagaggatttttaacattggaggtatgatgaattttatcaaaagccttttctgcattcattgagatagtcatatattttttaaaggaaatctgtttatgtggttaatcacattcagtgatttgcatatgttgagcaatctctgcaccccaggaataagacattaattaccttctttatatgcttcaggatttcatttgctagtatgttgttgaggatttttgcatctatgttcatcatagatgtcggcctgtagggtttttttttttttttttttttttgtattggtgggcttaggtgtcagaatgattcatgcttcacagaatgagttagggaagactccctccttgactttttggaataatttaagtagtatgggtatcagattttctttgtacatctggcagaatttggctatgaatccgtttggtgcagggcttttttcttggtagtttttaaattactgatttaattttggaatgcattattggtcttttcagggtttcagtttctttctggttcaatcttgggaggttgtgagtttccaggaatgtattcatttcttctgtgttttctaggttgtgtgcagagaggtgtttgtaatagtctctacagatttttttgtgtttctgtgtggtcacatgcaacataatcttcatcacttctgcttgtgcttatttggatcttctccttttttttttttttttttgctaatagatcccctagtgttttggtcttgtcaattcttccaatgattcaacttttgrttttgttgatcttttgtatggattttgctatctagattttgctcagctcttaattttagttatttctttttaaatagtaactttagagtctctcttgcttgtctagttccaccaggtgtaatgttagggtattaatttgagatttttctaatttcttgatgtagttgctcagcactctccacttccctcttaacaggttttccctgtgtcccaagatgctggtatgtattgactctgatttcattaatttcaaaaagtttttttggttactgctttactttcaatcttaaccaaaaagtcattcaggagcatgttgcttaatttccatgtaattatgtggttttgagggattgtcttggtattgatttctatttttattgcactgtggtctatgagtgtagttgttattatatattttttaaaattagtttggatgtgttttatggtggagcatatggttgagcttagaatatatactatatacagatgagaaaaactgttagttggagtattctgtagatagctattaggtccaattgatcaagtataaagatttattccagaataccttggtttgttttttgctttgattatctgtgtaacttgtcaatggcatgttgatgtcttccacttttactgtgtggttgtttctgcatgtttttgtggctgcaggtactggtctttcatttccatatttagcactcacttaaggaccccttgaaaggctggtctgacgttaacaaattttgtagcatttgcttgtctgaaaaagattttatttctctttcacttatgaagttagtttggtagaatatgacattcatggttggaatttcttttgtatagggatgctgattataggyctccactctcttctggtttctaagatttctgctgaaagttctgctattagcctgatggggttccatttgtaggtgacatgctccttctctctagctgccattaacatattttctttcacattgaccttgaagaatctgatgactctgtgcttttggcatggttgtcttgtgtagtatcttgcaagggttctctgcgtttcctatatttgcatgtcaatctctctagcaacattggggatgtttttatggacaatatactccaatatttcttccacattgcttgctctctctgtctctttcaggaatgccattcagtctgaggttctgtctttttatagaatcctgcatttctcagagcttttgttcattttttctctattcttcaccattgtcgtcctatgttgaatcaaaggagaagtttctgagtgctgatactttttcctcagcttggtctgttacgttattaatgcttccaattgcactctgaatttcctgcagtgaatttttcattttcagatcagtttgttttttcttaaaatggcagctatctttcaactcttgaactattttattgtgtcccttggatgtttttcaagtttctcttgtatgttgatgagcttccttgctgtccagattctaatttctatgtgtgtaatttcagccattacagtctgcttaagaaccattggtgagtttgtttggaggtaagaagacactctaacttctaatgttgccagagttcttgcactatttctttctttctttctttcttttttccatctgtgtgggctgatgttcctttagtttttggagttgctgccttttggatgaggcttttgcttttttctttctttgatgttcttgagggtttgactgttataagttaggtttagttgattggcatcattttcagatgctttcaggggctaagactcagctgagcactcctgggctacatgctctatccctggtgaactgggacctggcccacagctttgttcttttgccccttgggggttaaatatctgttgccctggaggggccaatgtgttcccagcccattggtgacaacactaacagacgctgctagcaaaggtactccagtgggcttgtggtcatcccccacatgggtgcacgccagtggggcagcaggggtcccaaagcttgctcatgcctgcagggtggtgtgttttccatacgcatgtgcatgctggcagggtgatgaggggagactgtgggcaagcatacacccacaagggaaggctgtgggtggtcatgtgctgctggaagtctgtctgcaaaaacactcaaacagttaagcagggcttgccactgagggatcgatggcagtggatgctggtaaacagtggaggctgcactgcaagtggctgtagctaggcaggaccctggcagaggttagcagataagggggagctcagatcagactggccctgtcccacaggcaacacagccatgttcttttcggttccaacaaaggctagagctgcctggtggaatatggcagtctttggggaattggcagccatggctatgctccactgcagtcatttctacacaaaacctctggactccatacaggctggagttctgtctctgccaactctccaggcagttctccttgctagctcaggtgtacgtggtggttgtgtgtcaaatgtcttttcctatatttatctctgtattgtataaactcatacgaaataaccttgcattgctttttaaacattgaaatatatcatgcacagcatatataagtgataacgtattcagataagatgttgattattataaaggaaagcacaaaatgtcagcatctaaggttaacttaggatctgtcagagggtccatgaagtcgaaattattttataataatgctaagatataattggcctttttcattatgttgacatttgtagtcatgtttcaaaagcaatgttatccaaagtggctgcaccttagcatgaacaaggcaatgacactaaattgcactgctagtcattgtattctttactgctacacactgttagtaaaaatataaataaaaacaaaagttacaaaaaatgtaaaaaaggattgatatcagcaagaccatttagaagctcttcatacttttccctctcataaaacaagggcaaaaacaatgaataaacaactacattttaactatattatctgaaaaagaatgctagagcacagcaaaggagtagcagagactctgtggaacatgcaggctcaggatggcttcatagacaaggaagcaaagtattctgctgctgttactttatctcctcaaatgggattcactcagaactaagggggacttccctctgcaccagaaagtaagaaggaggtttctaacagcccctcttaagatcatggatgtctgcagtccttcctgctgaagaatcctgcagttctcacagatgctgagccaagtttggaaagctgccaggatttcacacagctgcattgttaaagaaagagcccacatttgcccccgttcttatttgacctaagctgctgctgcacagtgctatcttataactggagccactgctatattgtgtcttgctcatgagggcaataaccacktcatgcctccatccctgaggttttgccatcattacaccatgctcatacctagtagtacaccattactcagccaaactattatgggtcactcccctttggaacaagctgcctaggaggtcttccatctaccccattccagtgtctaccataccccaaccctggttactccaagcctggctccagcaaaacagctgcaaatctagcagccaaatacacaaggcacactgaacccacccccacccccaaacccagagaatagttagtgctgtgcacagcacagaagctgagtacaaagagctaggcccctgcatgcaccctcagtggacaaactaggctggtgctttgcctatgtgggagcagtgcacaagcttgtgggcaagctcagcactctcttgatgtgagaaccagcctggtgtcctgccccaaggggaacagcagacaagcagaggaccagctgtatgctctcttggcacacaaaagagcttggtggcataccccatggaacaacacacatatgaatgcataaatcgtgaactccctctgcatgtggagcagcttatgtcccacccacagtggagcagcaccagagacactgatgctcacaaaggcattgctggtgttgactacagctgaaggaactgcatagagactatgctattgcactcactggaatcaaagccagcatgctctacccartcaagccctaggaaacatcagcaggtaaaagtatctccacatgaaagacacttgataatattggaaaagataaccattccaccttatgcatgggtattaatatagggacacaagacacatgaaaagtcaaggaaatatgacattaccaatgaaacacaataattttgtggtaactgaccccccaaaatggaaatttctaattttttttaaaaagtaattcaaaataatgactcaagaaaactcagaaatatacaagagtacacagacacacactgcaacaaaatcagaaaaacaattcatagtatgaatgagaaattgatcaaagagatacatataatggaaaagaaacaaacataaattgtggagctgaagaattcaaccaacgaaataaataagactgagagctttagcagtatactagatccagcagaagaaagaatttttaaacttgaggaatgtgttttgaaacagtccagtcaaaaggaataaaaataaaataatgtaaaagagcaaataatgtaaaagagcaaatgaaataggtggtacatcattaatcaaacaaacttctgcattctagagatttcagtagaagagatggagaaaagcacaggaagcttatttaacaaaatagtagctgaaaatttcccaaattttggaagagatgtggatatccagatccatgaagctcaaaggactccagattcaacccaaagaggtcatctctgaggcctgttataatcacactgttaagacctaaagaattataaaagaaacatcagaaaattgtcaagtcacatataaaaggatctccatctgactgacagcagatttatcagctgaaaccttgcaggcctaaggagaatgggatrgtatatcaaagtgctggggaataaattgaggtaaaaatgccatacccaacaaaactattcttccaaaatgaaagagaaataaagtctttacctgacaaacaaaagttgaggaaactcaccatcaattatctttacattaaatgcttaagggagtgattcagctggaagtaaacatatagttactaagaggaaatcatatgaaactataactaataaaggtaaatttgttgtgaaattcagaacactccattattataaagtaatataatttttcaaatctctatgaaggttaaaatcacaatggtaaataatacctatagctacaacaagttgtaagtggacacaaaatattaaaacatgcaaatggagatacaaagttatgaattttaagaaatctagaatgtatgtgaccaaacttattatcaacttaaaattatttattgtaactgtaagcttttcatgtaagccctatagtagccactaacagcaaattacagcacataaacatataagaaaggggaaggaatacaaagcttattactatggaaaacccccaaatgacaaacgtaaaaaaatgagaggtgaagaaaggaacaaaggatacaaaatatttaacaaaatggccgaagctagtccttagtaaccaataataaccttaaatgtaaatgaatcaaattctacaattgaaacatataaagtggatgaatagataaaaaaatataacccagataagaaaaacataacccagctgtatgctgcccatgagagacgcatattacctgtttttccagttccagttgttactggaaaaagagactaagaagatcattatataatgacaaaagttgattcagcaaaaggatataacaattgttaatatataggcacccaacactggagcacacaaatatataaggcaaatattagatataaatggagaggtagcctgccatataataacagttggggacttcattcactttcagcaatgaaatgattatctaggcacaaaattaatgaaaactcagatataaactatactctagaccaggggtccccaacccccaggccatggaccagtaccagtccatcgcctgttagaaactggctgcacagcagaaggtgagtagtaggtgagtaagcattaccacataagttttgccttctgttagatcagcagcagcattagattctcataggagcatgaacccttttgtgaactgagtatgcaggggatctaggttgtgtgcttcttatgagactctaatgcctgatgatctaaggtggaacagcttcatctcaaaaccatctcacctcacagtgcatgtaaaaattgtctcccatgaaaccacttcctggtgccaaaaagtttggggatcactgctctagaccaaatggtactaatagacatttacagaacattccacccaacagctgcagaatacacattcttgtcaacagcatgtggaagttactccaggatacatcatatgtttggccacaaataagtatcaaaaatttgttggttttttattttactttattttcaacttttattttagattgagggagtacatatgcaggtttcttgcaaaggtctactgcatgtttgtcatataattgaacctgtcacccagctagtgagcatagctcccaataggtacctttttgacccttgcccccttcaaactctccccaagcttatagtctcctgtgtctatttttctaaactctatgtccatgtgtacacaatgtttagctcccacttgtaagtgagaacatgcggtatttggttttctgtctgtgttagtttgcttaggatattggcctccagctccatccatgcttctgcaaatgaattcattcttttctatgggctgcatagtactctgtgataccacattttctttatccaatccaccattgatgggcacctagtttgattccatgtctttcctattatgaatagtgctgctgtagacgtgcaggtgcatgtgtcttttaggtagaacaatatttggctttcaatatatacccagtgatgggatgattgggttggatcacagttctattttttkgggggggggttactttcaacttttacttcagaaacaggggatacatgtgcaaggtttctaaaaaggtatattacatgatgctgaggtttgaggtatgattgaacctgttacccaggtagtgagcatagtatctgataggttttcaccattaacactttcccttttatcctcaccttgtagcccccagtgtctactgttcctatcattatgtcaatgtttacccaatgtttaatttacacttataagtaagaagatgcggtctttggttttttaatttctgcattaatccacttagaataatggcctcaggctgcattaatgttgctgcaaaggtcatgattttcttctttttttggctgcataatattccattgtgtatatgtatcactttttttatacaatccacagttgatggatatctattttgaatctatgtcttttttattgtgaatagtgctgtgatgaacatacagatccatgtatcttcttggtagaatgatttatattccattgggtatatacccagtaatagtattgataggtggaatagtagttctattttttagttatttgagtaatcaccaaactgccttccaaagaactgaaccaactgacattcccaccaaatatgtataagcattctcttttctctgcagtcctgccagcatctgtaatttttttaactttttaataatagccattctgactggtgtgagatggtatttcttggtggttttaatttttgtttctccaataattacagtgatgatgagcattgtttttgtgtgttagttggatacttctatatcttcttctgagaagcatctgttcatgtgtcttgttcactttttcatggggttatttgtttattgcttgttttttccaagttatccaattgaatatctttatttttatattccaggtcatttgaaaaattcttttattagtggtgacatttcttgtttaatgattacttctcttcctaaacaaaagtagtagtagaatttttaactaattaattagttttattgtgataaaatatactcgccataaaacttactgtgttagccacttttaatttttttaattattttttattacaataggtttttggggaacmggtggtgtttggttacataaataagttttttagtggtgatttctgagattttggtgcacccatcacccgagcagtatacactgtacccagtatatagatttttatccctcaccctcctctcaccctttccctygagtcccragagtccattatatcattcttatgcctttacatcctcatagyttagcttccacgtatgagtgaaaacctacaatgtttggtttttcattcctgagttacttcacttagaataatggtctctaattccatccaggttgctgcaaatgccaatatttcattcctctttatggctgagtagtagtattccaaggtatatcatggtatatcatattttctttacctattcattgactgatggggatttgggctggttccatatttttgcaattgcaaactgtgctgctataaacgtgtgtgcaagtatctctttcttataataacttcttttcatctgggtagttaccaaggagtggggttgctggatcaaatggtaaatctacttttaggtctttaaggaatctctacactgttttccatagtggctgtactagtttacactcccatcagcaatgtagaagtgtttctttttcaatgcatccatgccaacatcttttttttttttatttgattatggccattcttgcaggagtaaggtggtattgtattgtggttttgatttgcatttccctgattattagtgaaattgagcatttttttcatatgtttgttggccatttgtatatctgcttttgagaattgtctattcatgtccttaccccatttttgatggcattgttttcttctcgctaatttgtttgagttctttctagattttggatattagtcctttggcagatgtatagactgtggagattttctcctgctctgtgggttgtctgtttactctgctgtttcttttgccatgcaaaagctctttagtttaattaagtctcacctctttatctttgtttttattgcatttgcttttgggttattggttatgaaatcattgcttcagccaatgtctaaaagggtctttcgatattattttctagaattttcatagtttcaggtcttagatttaggtatctgatccatcttgagttgatttttgtgtaaggtgagagatgaggatccagtttcattatcctagatgtggttagccaattatmccagctttatttgttgaatagggtgtccttttcccactttaggtttttgtttgctttgtcaaagatctgttggctgtaaatatttggatttgtgggttctctattctgttccgttggtatatgtgcccatttttacagcagtatcatgttgttttggtgactatggccttatagtatagtttgaaattaggtaatgtgttgcctccaggtttatgctttttgcttagctttgctttggctatgcagatactttttgggtcccatatgaattttgggaatttttctagttctgtgaagaatgatcatggtattttaatggggattgcattgtatttgtaggttgcttttggcagtatggtattttcacaatattgattctatccatctatcaggatgggacgtgtttccatttgtttgtttcatctatgatttctttcagcagtattttgtagttttccttgtagagatctttcacctcccgggttaggtatattcctaagtattttatttattttgcagctattgtaaaaggggttgagttcttgatttgattctcagcttggtcgctattgtatagcagagctgctgatttgtgtacattaatttcgtatcctgaaactttgctgaactcatttgtcagttctaggagctttttgcaggagtttttagggttttctaggtatacaatcatatcttcagcaaacagtgacaatttgacttcctctttaccgatttggatgccctttatttccaccttttgtctgattgccgttgctaggacttccagtactgtgttgaatagaggtggtgagagtgggcatccttgtcttgttccagttttcagagggaatgctttctacttttccccgttcagtattatgttggctgtgggtttcccatagatggcatttattacactgaggtatgtcccttgtatgccgattttgctgagggttttaatcatgaatggatgctgaattttgtcagatgcttttctgcgtctatcaagaagatcatgcgatttttgtttttaattctgtttatgtggtgtattccatttaatgacacaagtcattaacctgtttctattaaatgatccctgcatcctggtatgaaactcacttgatcatggtagattatgtttttgatatgatgttggattcagttatctagtatttatttgtggatttttgcatccatgtccatcagggatattggtctgtagttgtttttttgttgatgttatgtcctttctggttttagtattaggtgatactggcttcacagaatgatttagagaggattccttctttctctatcttgtggaatagcatcaataggattggtaccaattctttgaatgtctggtagaattcagctgtgaatccatctggtactgcacttttttttttttttttttgtaaattttttattactatttcaatctctctccttgttattggtctgtttagaatttctaattcttcctcatttaagctgggagagttgtatatttccaggaacttttccatctcctctatgttttctagtttatgctagtaaaggtgttcatactagccttgtgtgatcttttgtctttctctggtttggttgtaatgtctcctgtttcatttctaattgagcttcttttctctctccttttcttggttaatcttgcaacttgttgtaatatcatagacaatggtttggaagaattattatctttttatatatctattggccatttggatttctgtttgcagaaagccttgataaaatatttggcccttttttaattgggtagtttgttttatcattggttaatgctttgattgtcctatttaagaaatatttgcccatccaaagccataaagatattctattattttttaaagatgctttattcattttcctttgacacttaggtttttaatccattagaaacaggtttttgtgtattgtatgaattaagattgaaagttactatttttctatatatatattgagttatgtcaaaagtttttgtggtaaagattatactttccccactgcattgcagtgccatctttgttttaaatcaggtaacagcaacaagagcaagtgggctggatattattctgtttcattatcttaatccttgtgtctatatctactataactgtagtataactacaggctgtactatatctatacaatctgtaatagtatccctttttcattcatgatactgatcatttttgtttttttctccctttttcttgataagtcttgttacgtgttcatcgatattattaatcttctccacaaataatcttttaaatatgtgcagaacatgcaggtttgttacataggtgtatacgtgccatggtggtttgttgcacccatcaaccagtcacctaccttaggtatttctcctaatgctatccctcccctagcccttcaccctctgacaggcccccagtgtgtgatattccactccctgtgcccatatgttctcattgttcaactcccacttatgagtgagaacatgtggtgtttggttttctcttcttgtgatagctcgctgagaatgatggtcacattttctttatccagtctgtcattgatgggcatttgggtcagttctaagtctttgctattgtgaatagtgctgcagttaacatacatgtgcatgtgtctttatagtagaatgcgttataattctttgggtataaaaccagtaatgggattgctgggtcaaatggtatttctggttctagatcgttgaggaatcaccacactgtcttctgcaatggttgaactaatttacactccaaccaacaatgtaaaaagcgtttttatttctccacattctctccagcatctattgtatcctgactttttaatgatcgccattctaactggtgtgagatggtatctcattgtggttttgatttgcatttctctaatgaccagtgatgatgagcttttttttgcatatgtttgttggctgcataaatgtcttcttttgaaaagtgcctgttcatatccttcacccactttttgatgtttttgttttcttgtaaatttgtttaagtttcttgtagattctggatattagatctttgtcagatggatagattgcaaaaatgttctcctattctgtaggttgcctgctcaatctgatgatagtttcttttgctgtgcagaagctctttaattagatcccatttgtcaattttagcttctgttgccattgcttttggtgttttagtcatgaagtctttgcccatgcctatgtcctgaatggtattgcccaggttttcttccaggatttttatggttttaggtcttacatttaagtctttaatccatgttgagttaatttttgtataaggtgtaggaagtgatccagtttcagttttccacatatggctagccagttttcccagcaccatttattaaatagggaatcctttttccatttcttgtttttgtcaggtttgtcaaagactagattgtagtagatgtgtggcattatatctgagggatctgttctgttcctttggtctatatctctgtcttggtaccagtaccatgctgttttggttactgtagccttgtaatattgtttgaagccaggtagcatgatgtctccacctttgttctttttgctttggattgtcttggctaaatgggctcattttgttccacatgaaatttaaagtagttttttctaattctgtgaagaaagtcaatggtagcttgatacggatagtattgaatctataaattactttgggtagtatggccatttttacagtattgattcttgctatccatgagcatgaaatgtttttccacttgtttgtgtcctctcttatttccttgagcagtggtttgtacttctycttgaagaggtccttcacatcccgtgtaagttgtattcgtagatattttattttctttttagcaattgtgaatgagcgctcactcatgatttggatatctattattggtatattggaatgcttgtgatttttgcacattgattttgtatcctgagactttgctaaagttgcttatcaggttaagaaagttttgggctgagagattgtaggtgatcaagaaaggccttatagtttcacttaagtcttgaaatctggttatccatctggcatattaattgtgaaatgtattataagcagaggaaatggcataaacaaagttataaatgagcatcaaaatagcctgttctttgcggaaaattgcaaacaatttgttatggcttctgtttaggtatcaggttgcagagagctttgtatacaagctaaaggaattttgactttatcctctatgccagtagatttttaaatctgtattctaactagtccttttccatataggctctgcagacccttagaaccatccccagaaagagagaatagcctaataagtagggaccctgtttccatcagagtagctctggttttgcttgttttatattgaagttcttcgttggactctattaggaaaaaaaattcactgcttttaagagagctagtaaaattgtgaaactactgcaatgagatataagaagacctgaaaagttttaaccaggagaaaaagtatttaagatagattaaacaccataatgaaatacaacatgcagggatcatgtcttattttgggcggctaacctgactgtctatcctttcaggtgtggttcccaacaaaggtcagtttcccttggctgtgggagcccaggagttgtttctgtgcactggtcctatgtgccgytatgctgaagacctggcccccatgttgaaggtcatggcaggacctgggatcaaaaggtatgttcatttatttttatttccttggactcttatcctgacattcattctctctttgtttattagtgtcatagaggtagactttcagtcctcaagcaaataatttttacaggtttttatgagagagcctttatatacttatataagtggataccatgcttcacaaattggaaagatgccatgtaaaagtattttactgagaaaatacaaagagaggccttatttttgggaaggaaacagtgaatctttttgtttttcatttgtgaatttgtgcataaggactacgttcactttaagttcagcctttctgattcttctgacatctgtcaccatatacatactttccaatctcacctaggcatcaacgctgcttggaaattggttccctagacagctcttttttaatatattttctgtagcagtcatttcaaattatttccatttccagcgaaactctgatcttctcctttcctttaccctcaagtaaataatcccacattttatctcataaaaaaatgcaatctatatgtaacttacttcagtttcttaccatcacatttttctaggtctccagctttcattctttctcctcttagagtggagaaaatatctttccattttgctttagcatataagtagtttcagttatgctcttgatcttatgttctcttattctctcagatctttgttccattacttatctcatcttagtatgactttaacctctctctctctgtctctctcgctctctctctctctcacacacacacacacacacacacgtgtgcgcacccttctcattattattaagcatcctaagtgtctctcatcttaaaaagagacaacatttttttagccccttattccccttaagccactactctatgccgctttttgccccattgccagatcctttgtgtgaattatttatactcattaactctaaattctcacattgccatctcataaatgaattcactacaaagtggtttttaccaccaaaattattcttgccaargtccctgaatttttttttttttttgcatttttgctaaaaataatgactgcttctcaatacttaccattcattacctcattataactggtggcaatattgatattactccatcattattgaaacaaactctgcccttggctcttgtgattcaatcatttttaaaattatttttaatttttgtgggtacctaacaggtgtatatatttttgggctacatgagatattttgaagcagtcatgtaatgcataataatcgcttcatggaaaatggggtaggtatccatccccttaagcatttatcctttatgttatggacaatccacccttttgatattgctccttttcctttcatctgccttactggctcttcttcctttgttcatctcttatatattggtattctagaaggacctggtttacttatctctattctttctacttaccctctcagaatgactccatctacccttgccacttcaaccattttccatacacagatgatgccaaaatctgcctcttcagctcacttttttcacttaagctagaggactgtctatttactactacaggaagactggscatttcagataactgagactcaatatatctaaaactgatattatttttctttcaagctccagaaacctgatccactactttgattcttacccaatcccagtgactggatgaccaaaatcaacccagttgctaaagcctcatttccgatttttctcagtcattacatctaagcaatgctgagtcatattgaaattacctactaatgatttcttacatctttacatatctctcccttaccatggttacagttctagttcaggctataatcatttctagcatgaactaccaccaaaacattttgacttgtcaccacgtctacaattttgatgcatttcaaaccattctctcccttgcagctcaagtacattttttaaatgcaaatctaaattctaaaggtataatactgtttctggcacacagtgctcagggaaaaaaatacttcattagagctgaagctcagatgtcaggattgaactattaaggatatctaaataatttgttgatgtcagtttctttttaatcctacacaggttaaaactagacacaaaggtacatttaaaagacttaaaattttactggatggaacatgatggaggctcatttttaatgtccaaagtggaccaagatctcattatgactcagaaaaaggtaattttaaataaaatttgtttaggaattatttttagtcaaagagatatccttctgagccctttacttcacttactgccaaatatttctgtgtcagcatacggaattaaggttttcagaacagttatactaaggaattttggatgtaatttttcatggttattttagatattttattttttagtaatgaaatgagtactttgaaaataaagtatgataaatcaaataaataaattgctcagaggtaactgtcattaataatttggtatgtatctatccagtgattctcctatgctaatgtgtagatgtaaattttaggtaatagagacaacattatatatgcaatcattttagcctgagctttattttaaaatacttttataatcagatgaaataatagcacaaatttgtctttttaaaagcaagagttcatttgggaaagaagaataataaggggaacagacctaccaaattttaaaagtaatttttaaactactattcaatktaataataatacagcttattacgtggaagcaatggaagacaaagaaggcccttacataatggtaaagggatcaattcaacaagaagagctaactaccctaaatatatatgcacccaatacaggagcacccagattcataaagcaagtccttagagacctacaaagagacagactcccacacaataataatgggagactttaacacgccactgtcaacattagacagatcaatgagacagaaaattagcaaggatatccaggaattgaattcagctctgcaccaagcagacctaatagacatctacagaactctccaccccaaatcaacagaatgtacattcttctcagcaccaaaccacacctattccaaaattgaccacatagttggatgtaaagcactcctcagcaaacgtaaaagaacagaaattataacaaactgtctctcagaccatagtgcaaacaaactagaactcaggattaagaaactcgctcaaaaccgcttaactacatggaaactgaacaacctgctcctgaatcactactgggtacataacgaaatgaaggcagaaaaaaagatgttctttgaaaccaacgagaacaaagacacaacataccagaatctctgggacacatttaaagcaatgtgtagagggaaatttttagcactaaatgcccacaagagaaagcaggaatgatctaaaattggcactctaacatcacaattaaaagaactagagaagcaagagcaaacacattcaaaagctagcagaaggcaagaaataactaagatcagagaagaactgaaggagatagagacataaaaaacccttcataaaatcaatgaatccagatgctggttttttgacaagatcaacaaaattgagagaccgctggcaagactaataaagaaggaaagagagaagaatcaaatagacgcaataaaaaattatgaaggggatatcaccaccaatcccacagaagtacaaactaccatcacagaatactataaacatctctatgcaaataaactagaaaatctagaagaaatggataaattcctggacacatacaccctcccaagactaaaccaggaagaagttgaatctctgaatagaccaataacaggctctgaaactgaggccataattaatagcctagcaaccaaaaaaagtccaggagcagacagattcacagccaaattctaccagaggtacaaggaggagctggtaccattccttctgaaactattccaatcaatagaaaaagagggaatcctccctaactcattttatgaggccagcatcatcctgataccaaagcctggcagagacacaaccaagaaagagaattttaggccaataaccctgatgaacatcgatgcaaaaatcctaaataaaatactgccaaaccgaatcaagcaacacatmaaaaagcttatccaccatgatcaagtgggcttcatccctgggatgcaaggctggtttaacatacgcaaatcaataaacgtaatccagcatataaacagaaccaaagacaaaaaccacatgattatctcaatagatgcagaaaaggcctttgacaaaatttaacaacacttcaagctaaaagctctcaataaattaggtattgatgggacgtagctcaaaataataagagctatctatgacaaacccacagccaatatcatactgaatggcaaaaactggaagcattccctttgaaaactggcacaagacagcgatgctgtctctcaccactcctatgcaacatagtgttggaagttctggtcagggaaatcaggcagcagaaggaaataaagggttttcaactagaaaagaggaagtcaaattgtccctgtttgctgatgacatgattgtatatctagaaaactccatcttctcagcccaaaatctccttaagctgagaagcaacttcagcaaagactcaggatacaaaatcaatgtgcaaaaatcacaagcattcttatacaccagtaacagaaacagagaaccaaatcatgagtgaactcccattcacaattgcttcaaagagaataaaatacctgggaatccaacttgcaagggatgtgaaggacctcttcaaggagaactacaaattactgctcaatgaaataaaagaggatacaaacaactggaagaacattccatgctcatggataggaaaaatcaatatcatgaaaatggtcatactgcccaaggtaatttatagattcaatgccatccctatcaagctaccaatgactttcttcacagaattggaaaaagctactttgaagttcatatggaaccaaaaaagagcccacattgccaagtcaatcctaaaccaaaagaacaaagctggaggcatcatgctacctgacttcaaactatactggaagactacagtaaccaaaacagcatggtactggtaccaaaacagagatatagcccaatggaacagaacagagccctcagaaataatgccacacatctacagctatctgatctttgacaagcctgacaaaaacaagaaatggggaaacaattccctatttaacaaatggtgctgggaaaactggctagccatatgtagaaagctgaaactggatcccttccttacaccttatacaaaaattaattcaagatggattaaagacttaaatgttagacctaaaaccataaaaaccctagaagaaaacctaggcaataccattcaggacataggcatgggcaagaacttcatgtctaaaacaccaaaagcaatggcaacaaaagycaaaattgacaaatgggatctaattaaactmaagagcttctgcacagcaaaagaaactaccatcagagtgaacaggcaacctacagaatgggagaaaatttttgcaatctactcatctgacaaagagctaacatccagaatctacaatgaactcaaacaaatttacaagaaaaaaacaaacaaccccatcaaaaagtgggcaaaggatatgaacagacacttctcaaaagaagacatttatgcagccaaaagacacatgaaaaaatactcatcatcactggccatcagagaaatgcaaatcaaaaccacaatgagataccatctcacaccagttagaatggcaatcattaaaaagtcaggaaacaacaggtgctggagaggatgtggagaaataggaacacttttacactgttggtgagactgtaaactagttcaaccattgtggaagttagtgtggggattcctcagggatctagaactagaaataccatttgacccagccatcccattagtgggtatatacccataaagacacatgctattcacaatagcaaagacttggaaccaacccaaatgtccaacaatgatagactggattaagaaaatgtggcacatatacaccatggaatactatgcagccagaaaaaatgatgagttcatgtcatttgtagggacatggatgaagctggaaaccattattctcagcaaactatcacaaggacagaaaaccaaataccgcatgttttcactcataggtgggaattgtacaatgagaatacttggacacaggaaggggaacatcacacaccagggcctgttgtggggtkgggggagtggggaaggatagcattaggagatatacctaatgtgaatgatgagttaatgggtgcagcacaccaacatggcacatgtatacatatgtaacaaacctgcatgttgtgcacatgtaccctaagacttaaagtataataaaaaaaaaaaaaaaagacatgtaaaactagaagaaacttgattgtggtaaaagatggcttttatattctatctttgttttctgccaccatgaaaaaatgcctgtgactcaataacttataaagaataaaaatttatttctcacacacctgaagacaggaaagtccaagatcaaggttctggcaggttcagtgtctggtgagggccatcttactgccttctccagaggggagaaacatggcagaagggtggaagagacagctgctaaggctgcataaagcctttgtaaaaatggctgtaatggcattaactagggcagccctcatggcctaatcacttctttagggcccccctcttaataataatgcattagcaacacctgaattttggaggcgatctattcaaaccataggtcaggacatccaggccatcctggctaacacggtgaaatcccgtctctactaaacaaaatacaaaaaattagccgggcgcggtggcgggcgcctgtagtcccagctactcgggaggctgaggcaggagaatggcgtcaacccgggaggcggagcttgcagtgagtgaagatcgcaccactgcactccagcctgggcgacagagtgagactccgttaaaaaaaaaaaaaaatagcataagtggatacattactgtgttactagatttgaaagtcatgttataaaattatacgttatttttaaatctatagggaaaatgtaattcatataaaaactcagtggatttttaaatttctttttgtaatgcttaatgaggataaaagaaaagtgagatcttcataagttataagcccagaaacagaatttcttcctatattaatttttacgtgtattaagatagcttcacatatctgaattaataatatctaaatgaaagaaatcatagaaaatactgccaataaaaatgatagaggattattaacaggctataacctattataagagaaataccaccagggacataggtaaaggagaaaggtaaattataaaagaagttatataagtgaacaataaaaacacaagaaatgttaagacttataagtaattaaaggaaaaactatagaaaaattaaggtactataccttcgttgcttgggttgataaaccatagaatgctagtggcaaagcaaattggtactttcctggcgagctggaggataaatgcaaaattatgaagccaggagcaggaggaaaaaagtaagtgaatggaagtaaattacttacattgaacttttagtccaatgtaatttgctctcacagtagaattacctcccttcctgttctgtagctttagcaaaaattctaataacttaatgtacagactcttcattaccaaattctctagccaatttaatattctgaccccaaacccttccctttacggtattaaaaccatatttttgctggcctgaaattcatgtgtatgaaaagccaattttcctaaatgggttttttcactgttgatactaatcaagagtctcactgttattgaaactttctctgcagtgtcagaagtgacagtgttgcagacctcatcacctgttggcatcaggtagcagggagagctatcacagaatagtttagtttgaaataatagtttaaaatagtcacatgctaaaaaagagacagattgaaatacatgtgaattcatttaggagtttcatttcatattggataagtttagaacaggctctagtgaagattggtgtatggaatacaaggatctatactactgttgtatgctttacaagttggttccataagagaaattttataacctaaatatttttccagaaagcattttataaaattcagatgtctgtttctgattaaaaattattttttgccatactatgttctttttatattatatgcatgaaatccagggcaatctctttaaaatataaagttagataagcatgctaaccatcaccattattatttatagaaagtatgccaaggataaattagaaataagaggtatgactatgaaaaaagacaaatcaataattatttatagattaagatatgagtatattcttgtaaaactcaaggagtgctattttaaaactcttagaataaatgagttcaacctaaaataggatgtacgatgaaaatgagaaaaaccatagctaacatatcagcaataaccagataaaaagtagaatgaggaaaacagagaagacaaacagaaaatcctacaaaatgcctacagactctaaaaataaggttgtagaacctaccagagaaaaattacagaactttactaagagtcctaaaatgagttttgaataaaaaaagaaacttagttttatagcttgagttgttggtggatagatcccatagcctatataatccctgtcactgggattacaaatatcattccattttataaagttcctaggcacactccaaaattccatcacagtgataaatgcatttctgaaacaccaacaggcctgctgttctataatctgtcattgcataaattaatttatgtatctttgtttctgtatattttctgaaaaggaggaagtggaggaacatgagaatgagtgatgtgtgtatctgaggagggaggaggtaaatagagaaagacattattacatcattggaggtggggtaaggatgtgtgccacctccaccattcccaagctattgtcagaaaaataccatgttttaggacaggatggctatattttatagcaattaaaatcaaattagcaacttttattatggaagttgagaaaatgatgttaaggttctcctgtcagaataaatagccaagaagaaatgaaaacttttgactcaggagaataaaaatattaaggatttagtattccagaattttaatatggcataatacatttaaatatttctctaaagttaataactttatatagcaatttgaactttatccactttcaggttcaatataaagagggagcttttttgattttgtagcagaaactcaatagttgctaactgatgttggtctgtaattctttctaagtcagaataaaaggaaaggagttaggacatcaaactttgtgggggatattttataatccaggtctttttatcatttctatatttcctagcaacaccttacttttacctattttgtagaaaaatatgccaaggccttgtgtgctgttggatttttttattagcagattttatttttagaacagttatatatttaccaaaagattgagcagatagtacagtgtccatgggtagcccctctttctttcactagtagggtacatgtttcatgactgatgaaacaatattgatatattattaactaaactccatagtttacattagtgtttatattgtacagttttacagcatttgacaaatgcataatgccatgtaactatcattacaatatcatacagaatagtagtttttaccactcaaaaaacttctgtgcatcacttatttattcatacattctctccactcctactggaaaccacagattttttactgtctttatacttttgcctttcccctaatatcatatatttagaatctaaattatgtaaccgttttatacttgcttctttcacattgaaatacgcatttaagttccctccatgtcttttcgtggcttggtaactctttttatctctgaataatatttcattttaaggatgtgccaccattttttacctatttacctagtaaaggacatcttggttgtttcaaaatattgttatctttgaacaaaagctgttataatcatttatgtgcaccttttccatagacatgttttctattcaattaggtagtaccaaggaacacaatatactttgctttgttagaaatcttgagattgtcttccaaagtgggtttgttatggtactcnnnnnnnnnnnnnnnnnnnnnnnnnnnnnnnnnnnnnnnnnnntggagtaccctaattttagtacccttacacacacacatacacacgcacacacacacacacctacacacacacacacatatatatatatacatatataatatataatgactaatacaaatgaaagtttgtaccctctgaccaatatagctttatttcatccccttaccccaccccaattcctggcaactacgattctactctctacttctaggaatttgacttttttagattacataaataaatgatattataaaacatttgtttttctgtgtctggtttatttcacttaacataatgcccttcaggtccatctatattgttgaaaattgcaaaattttctatacttttaaggctgaataatattccagtgcatgtatatacagcattttctttatccatccatcaacacacacttaggatgttttaatatcttagcaattatatataatactgcagagaacatgggattgcagttacttcttagagatcctgatttgaattacttcaaatatattactagacgtagcattgctggatcatatggtagttctatttttaatgttttgaatggctgtacaaatttacatttctaccacagtgtacaaggtttcccttttctccctgtcctcaccaacacttacctttaaaaaaaaataatagctatgctattgggtgggaggtgacatctcatcttggctttggtgtgcattcacctgatgattagtgttgttgatttttttttttcatatacctaggggccagttgcatgtctcctttgaagaaatgtctattcaggttgtttgccaatttttcarttaagttatttgtttctgataagttctatgaattccttgtatattttgaatattaatcctatatcaaatatatgttttacaaatgttttatcccattcagtaggttgcctttgtattttatattgttttctttgtgtgaaaatactttttagtttgctctaaaccaatttgtctatttttgctttattagcctgtgctttcggagatacatgcaaaaaacaattgccaagaccaatgtcacggagctttttctctctattttcctctaggaatttcacagtcaagtcttatatttattgtactttattttttattattttagattgaaagggtacttgtgcatgttgttaaatggatatattgtgtaatggtgaagtttgggcttctagtgtaccagtcatgcaaacagtgaacattttatcccacaggtaatttttcagccctcatctacctcccacccttccatatttttgagttgccagtgtcaattatttctgcctacttgtccaagtgtatccattgtttagtttccacttataagtgagaaacagactttctgtttctgagttgtttaacttaggataatggcctcaagctaaatccacgtggttgcaaagggcatgctttcattttttatggccgtatagtattctgtggtgtttatatatcacatttctttatccagtcaaccattgataaaaacttaggtttattccatgactgctattgtaaatagtgttgcaataaacacaacacacaagtttaggtgtctttttgatataataatttttttcttttggttagatagtcaggagtggaaatgcagtgctgaatggtagctttattttggttctttgagaaacctccatactgttttccacagaaattttactactttacaatatgccaacagtgtataagcattcctttttttctgcattctcgccaacaactgttattttttaccttaaaaaatagccattctgactggtgtaagatggtatctcattgtggttttaatttacatttctctgatgactagtgatgttgagcaccttttcataatttttttttgtagctaattgcatgtcttattttaagaaatgtctattcatgttttttgctcactttttaatggggttttttttgttgatttgttttggtttcttgtagactgtggatattagaccattttcagaggcataatttgcaaatattttcttctcttctgtagtttgtctttttgctctgttgattatttcctttgctgtacagaagctaaaatagtttatgttccatttgtgtacttttgttttcgttgcatttgcttttgaggtcttagtcataaattatttccctcaatgtcagaagttttttctatttttttttcttaggatttttcttgtttgaggtcttacatttaagtcataaatgaaacttgagttcatttttgtatatggtgagagagaggggtccagtttcattattctgaatatggctagccaattttgccagaactctttattgctattcagtaaagcaatatttcatatcctttcttcactgtttatttttgtcaactttgtcaaagttcagttttttataggtatgtggctttatttcttgrttctctatttggttccattctatgtctccatttttttaccattaccatacagtctttgttactatagttttttagtatattttgaagtcagataatgtggggcctcttttttctttttatgaaaaatttatttggctcttcaggctctttttttgttttatatgtattctaggattttttttctaattctgtgaaaaattatctttgtaatgataggagttatgtttagtctgtagattgctcttggcagtatggtcgttttaactagtgatacttccagtccatgagcataagatctttttctrtttctggcatctatgatttattatatcagtgttttgtatttctccttatagtgatctttaacctccttggttaaacatatttctagtattttatttttgtaaatggctagtgtaaatgggatggaattttttatttgtttcttaggtttaatgctattggtgtatcgaaatgctactgactttatttacattgatttggtatcctgaaactttaccaaaattgtttatcaaatataggaattttatgtaaagtctaggttttctaggtatgtcatcagcaagcagagataacatgactacttctttttaaatttggatccctttcctctggctagaactgccagtactatgttgaataggagtggtgagastggagatccttgtcttttttcagttcttgttttttttgtttgtttgttttttgtttttggcaaaactatttccttttattctgtggaacgtcactaacgtaaatagacatgtgcatgatttatgttaatttatacacgatgagaattaaggctgaaaatgacatccgggaaaactcctactattagtttcagatcttctgggcaggggctgactcttggctgccttatacttcctaactcccagtgggcctgaatagacactggccagattttcaaagtagcttcttgaagatggatgatgatctgtttagaatgatccattcacctgttctgtttcagggtccaaatcagtatcataaaaacagggctgggtggggagtccattgtgctcatcgttcctactaaagggtacagaaaaccagccccgatgytggcatggatgttgcgaatgggcagaatgaatcctgtagggacaccttttcgctctgggttgtgagacaaggacaagtgtgttttggccatgcagatggggagattcccaaagccctgctttgtgtagacttcagctttgtgttgagctttgaggagtaattcaatgttgtctgctccatagatcttctgtgcaatgatcctgattttatcctcaactgggagcttgaggtcataaaggagttggaagctgctgggtgcttgtcctgctctctggacagcctgagccagggctaaggtacccttgcccccttctgccagtgagtgcacttcacggcatcaaaagccctctgttctctggaaaggcagccgatgaggtccagctcagtctctgtatctrtcttgaatgcattcacggccactactactggaattccaaacattctggcattttcagtttgtttcttcaagttactgaagmctttttcaaccagctccaggttctcctctatgtaagccttgggaagaggcattccagcagtgaccatagggccacccctgtgcatctttagagygctgacagtggcaacaagcaccaccacgtgagggtggagaccggaatactgggatttgatgttaagaaacttttctattccaatgtctgctccaaatcccgcctccgtcactacaaacccttctgggccaacaagctagagtgtgatccggtctgcaatgatagaggaattgccgtgtgcgatgwtggcaaatgggcctgcatggacaaacactggagtgccctccaatctctgcatgagattgggcttgattgtgtccttcataagcactatcaatgcaccactcacccccagatcttcagcactgacggggtctcctttcttactggatgccaccaccattttgcccagtctctctctcctgtcttctagagaagtggtgagagccaggacagccataatttcactggccacagagatatcaaagtggaccgtctgtgtgtgacttttcttcgttggagcctgtccaatcgtgatcttcctcaggaatctatcattggtattcaacactctttgccaagctatggtttctggatcaatgtccaatcttgcaaatctgtttatctcttcatctgtcagtgtggtagagtcagtcttgtcaatgcctagtctgtttaacctttgtatgtggatatcagagaactttctcactccatttactgatggcaccaaatgagtaaaggtagccttgtctgtctgggtcagttcatgaaatatctgagcatcaatagccgcagcaacaaggttattagatacagtgatggcatggatgtcacctgtgaggtgaagattaaactcttccataggaatgacctgggagtagccgcctcctgcaacaccaccttttattccaaaggtggggccctgagaaggctgtcgcacacacataaaaaagttctggtaaagatgggcaagaagggcttgcaccagcccgattgtagtcgtgcttttcccttctcccaggggtgttggagttattccagtcaccacctgatatttcccaacaggctggtgcttcaggcgttctagtgctgacagcagaactttggcctttgtttcaccatataattctacctcttcagacagcagaccaattactcaagccagcttaccaatgggcttcggtttacaagatcgtgatatatcaatgtcacttggaacaggtgtcttgaggttaaggttgttatactgaatcatccactttcctggcttaaatttctccaggaaaygcttggcactctctacagtgctctgcatgagcattgcaaccgtcatgagccctaagccaccaggaacgggcctcgtcgtatgccacatcacccacaacttttctcccatttgttttttttatcatctgggacataattgattccacagttgatgactattgctaggtttgatccattcccctttaaccatttcaggccraccagttgcaaccaccaggatgtcgcctttatttacctcctcatccagattggcagtcttggagtggcaggtggtcactgtggcattgttccacagaagcaagtcacrcatcagggccctgactattttactgcacccaaccaccacagcatgccttctggcaatctgcacccctgtctctttcatgagttccaagcatcctttaggcatacaaggaatgaaacagtcatttaggtcacctctagcaagtttcccagcactgatgctagtcaatccatccacatccttttcaggtgcaatagcattgatcactccttcagtgtattgtctgagtctagagatagctgcactacgaaccygtgtacagtagagtcttcattcaaagatatgatgtacttgatcacctcagattctgtggttgttcttggtaacttaatgtcagtggctttcatcccaatctcttcagcagccttcagcttcacattatataaagattggaatcatctctgttgccaacctgtaatattgccaggcctggtgtgaaaccaggtacttgtccttcaactgagtgacttgattcttcagtctcgcccttatttgtgcggagatctccttcctgttcaggatttctgctggtgccatggcctttattagtctgctgcccacgatggacaccaccaatatcctgttcagttcttaggaggaatgctttaaccttatcctcattcagtatgatgttggctatgggtttgtcatagatggcttttattaatttgaggtatgtatattaaatgcctagttggttgtgaagaaatgttggattttatcaagtcgtttttcttcatcaattgagatgatcatgtagtgtttgttttttattctgtttatgtggttaattacattattgatttgcatatgttgaaccatccttgaatctctggtatcaaacccacatggcttgatgtactgtttgtttaaatttgctaatattttattgtggatttatgcatcagtatgcaccaggtatgttagcttgtaaggtttttttattctttccttgcataatatttgtatcaggtgatactgctttcatagaatgagttagagaggaattgttcttccttgattttttggcataatttaagtaagattgggacaagttttttgtatgtctggtaaaatccagctgtgaatcaatctggtcctgggccatttttgttggatattttgtattacagattcaaattcattacttgttattggtctgtttaggatttccatttctttctggttcaatcttgggaggttgtatgtgtccaggaagtatccatgttttctaggttttctagtttgtgttcataatagtctctgatgatcttttctgtttctgtgatattggttgtaatgtcaacactatcatttctgattgtgtttatttgagtcagctgtcttctcaattaatctagttggtggtctatcaattttgtctatcctttcaaagaacaaacttttcattttaatgattgtataattattttaatcttaatttcatttagtgctgctttggtgttagttatttcttttattctgctagctttaggtttagtgttttttttttttttttcttgtttttctacttccttgaagtggagcattaggttgttagttggggatttttctctcttttggatgaaggcatttaatgccatgatttttcctcttaatactgctattgttgcatcccaggagttttggtatgttgtgtccccatttttgtgtttcaaaaatattattttatttctgccttaatttcattgtttacccaaaagtcatgcaggagcaagttatttagttcccatgtatttgtgttgttttgagagttcctcttcatatcgatttctacatttatcccactgtggtccaattagatacttgatataattattattttttcaagtgtattgagccttgctatatggccaagcatgtagttaatttgggagaatgttctatatgcagataagaaaatgtatattctgtcatttacataacattgtcaaatgttgtgtaaatatctatgcggttcatttggtctgggtccaatttaagtccagagtttattgatttcctgccttcgtgatctgtctagtattgtcagtgagttatttacgtttcccactatttttgtattgctttctattttcttaggtctagtcatatttgttttatgaatttggtcttccagtgttgggtgcatatatatttaggatagttatatttctcattatataatgcccttctttgttttttgtttacttttgtttaaagagtagctcagttttctgttccatttgcgtgatacatcttcttcccccttttgctttttgtctgtaaccattaggtgggtgtcttaggcagcagttagttgggtcttgctttttcatccaatatgccagcctatatcttttaagtgcagtatttaggccatttacattcaatgttagtactgatacatgaggttctgtttctgtcacactgatgttagctatatgctttgtagtctcaatcatgtaattgccagataagatctgtgagttttgctcatgtgcacatgtgacatgtgcttttatgatgtcagtgtcatttttttgtttccatatttagtacttctatgagcatttcttgtagggctggttcaatgatgaattcccttagcatttgcttatctgggaagtactttacgttttttcatttataaagcttaattggcaggatataaaattctttactggcattttttttttcttcacagaggctaaaaacaggctctcaatctctactggcttggtaggtttccgctgagaagtccactgtttgactagtgggatttccatcataggtaatttgatgattctctgtagctgctttttttttctttttttatttattattatactttaagttcgagggtacatgtgcacaatgtgcaggtttgttacatatgtacacatgtgccttgttggggtgctgcacccattaactcgtcatttacattaggtatatctcctaatgctatccctcccccttccccccaccccacaacaggccccgatgtgtgatgttccccttcctgtgtccatgtgttctcattgttcaattcccacctatgagtgagaacatgcggtgtttggttttctctttgcaatagtttgctgagaataatggtttccagctttatccatgtccctrcaaaggacatgaactcatcttttttatggctgcatagtattccatggtgtatatgtgccatatgttcttaatccagtctatcaaaaggatctagaactagaaataccatttgacccagccgtcccattactgggtatatacccaaaggattataaatcgtgctgctataaagacacatgcacacgtatgtttattgcagcactattcacaatagcaaagacttggaaccaacccaaatgcccatcaatggagctgcttttaagatttgttttttcacattgaacttggataatcaaataattataagccttgatgatattaatcttctgtaatatctcacaggtgttctcagaatttctggtatcgggatatctacaactctaacaaaatcaggaaatgtttcctgaattattccgtcaaatatgttttccaaatttcttactttttcttctccctcaggaatggccatgcattgcggatctggttgctttacacaatcttatatttcttgaagatgttgttcatttaactttttttttttttgcagttgcaagatttaatagactgaaacagagctcccataaaatgggaggtgacccaaagggggttgtcgctgccggctcaaatgtctaggttttatatcccgatcattgtccctccctctgtgctctcaggtgatagatgattggctatttctttacctcctgttttaacctaattagcattttagtgagctctctttactagctgactggtcgggtgtgagctaagttgcaagccctgtgtttaaaggtgggtgcggtcaccttcccagctaggcttaggaattcttattcggcctaggaaatccagctagtcctgtctctcagtcacaccctctcaacaggaaaacccaagtgctgttggggaggttggctgatgatcgctctaattgcttcctgctgaattggggcatagtaggcatcatgccattgagattttctttggaggggtgcctttgatgttatcaacatccgagcatggactagcaggccggtccaggaatccacggtagatcttagtcatggactgcaactggggctccatttgaagaatgatttgtagttttacagcttcgattctggaagagacaaacttaacaaggaggttaaagatacagggattgaaatgtgtgtcctggcagtgcaggggatttgtatggcctgcagtgcaggggattatttctttggcacacttcacaggccctgactatctgcttgatagttttgaaaaggcctggtccagtaaataataatttggccatctgatgggtgctatcaatgcctaagtgaaaggtttggtgaagggtttaaataatttccatgggttagctgcagacaaaagtattttcccttcttcagtggctagccatcctgaggggaggaaactatgtccttgtgaggttccccattctctttctcttgctgagtactggggcttggttttctggaggggattaccccatactaggggtccttctataagcatttcttatggagggtcctgccttgtggctcttttggcttcaatatccacttggcggttcccttctatttcccttttctttcctttctgatgaccccagtagtgtaagattgccacctctttagatttctgtgcagccaataataatctcctaatggcttcctgatgtttgataggtgttccttcagaagttaagaattccctttctctccatattgctgcatgggcatggaggactaggtaagcatatttagagtctgtatatatatttacccttttcctttctcctaattctagcgcctgagtgagggctattatttctgccagctgagcactagttcctggagtgaggggattactttcaagtattccattatcactgaccactgcataatacrctttttaaagtcctttttctacaaagaaacttccatcagtatacaatttgaggtcggaatcagtcaagggaacctctagaaggtcccctcgagtggtgtaggtttgagcaattacttgttgacagttatgttctatttttcttcattttctggaagaaatgtggctggattaagagttgcacaggtgtgcagttgcagcactggtccttcaagtaataaagcctgatatttaagcaaacggttgtctgacagccacaagtcttctttagcaatgagtatgccattcacatcacgagatgtccacacagtaagatctcttccytgtgtcattttaactgcttcagatactgagactgctactgctgccactacccataaataatgaggccaaccctttgccactacatcaatttccttactcaggtatgccacaggttacaagctggcccctcggacctgtgtaaggactcctagagctattcctgctttttctgtgacatataaagaaaagtcttgccctgttggcatgcttaacactgggacttgggttagagccttctttagggcccggaaagccacttctgcttcaggtgtccatcttactaaatgggtattggctttccgagttttcttaattagtgtgtataatggcctggctatttcactgtacctgggaatccatgtttggcagaagcctgttatgccaaggaaccctcttagttgctttagggttttgggatgaggataagccagtgtaggctgaatgcatttctcactgaggaccctggtgcctttggataattttagacctaagaatttaacctgctgttagctgagctgagcctttggtttggaaaccttgtagccacaggtggcaaggaaatttaagaacacttgggtggggctgggcgcagtggctcatgcctgcaatcccagcaccctgagaggctgaggcgggcagatcacaaggtcaggagattgagaccatcctggccaacacagtgaaaccccgtttctaccaaaaatacaaaaaaattagccaggtgtggtggcgggcgcctgcagtcccagccacttgggaggctgaggcagaagaatggtgtgaacccaggagacagagcctgcagtcagccgagatcatgccactgcactccagcctgggcgacagagtgagactctgtctcaaaaataaataaataaaaaatttataaaaagaccacttgggtggcttgatggcacaaggtttctgaacgggcagctaaaagtaaatcatccgcataccaaaagacaagagtgtccaggtatgagaactggctcaaatcttgggctagtgcctggccaaatagatgggggctatctctgaacccttgaggtaaaacagtccaggtgagttgagacattgggtttgaaggatcttcaaaggcaaacaagaattgagagtcaggatgtacagggatgcagaaaaaggcatccttaaggttcaggactgtaaaccactctgcttcctctgacatttgggaaagcagagtataagggttaggtatagctggatatagagggacaacggcctcattgataatcctgagatcttgcactaaccttctctgtccgttgggtttctgtactcctaaaattggagtattgcaggtactactgcatggttttactaggccttgggcttttaggtctttaacaatcttttggaatccttgttgggcttcgggtctaagggggtactgcctttggtagggaaaggaggtggaatcctttagtttaacttgaacaggacaggcattctttgctcatccatagtgtccttctgttgcccaggcttcaggattaattccttcctcaagcaggggacaacaaatgggtgttccttctcctatgttcaggtgtatagtggcccctgcttttgctagaatgtctctccctaacaagggagtggggctttcaggcataattagacaagcatgtgaaaagagtaaagttccccagtcacaacttagtggctgggagaagtatctagtgactggctgtcctaggaccccttggatagtgacagatctggaggacagttgtccrggacaggagagtaagactgagaaggctctgccaatgttcaggagacagttaacctcctggccctcaatgttcaagcatacccggggctctgtgagggtgatggcattggctggctcttgcccagggcaccctcagtcctgctgctggatcatctggttagtggcttctgactcagaggaccttcgtcccctggggcagtgggccttcccgtgattcccttgacataaggggcatggatgagggggcagcttatttctactcagacaatctttttaaagtgtccttgtagaccacactggaagcaagccctattaggcactcaatttgcccagcttttccgtgttccagagcctccaaattccacttgcctgagtgccatgactaaagtggtagcctttttcttatctcattggtcctgttccacctgttcctcctgatctctattataaaaaactgaggttgccaactccattagggtttctaaattttgctccaggcctaaggcagacttttgaaggtttttttctaatgtctgcagctgtctgagtgataaacttatcctttaagattagttagccttcaatagagtcaggtgacagagaggtatgcttcctcaatgcctccctttgtctctccagaaaggaagtaggattttcttcctttcctgtgttatagtagacatcattgaataatttataggcttcttcctagttttccttagtccttctaacacgcaagttagcaaatgtctgtggcaccaatctccatgttctgattctgcatccctctgagggtctacactgggaactgcctggtggcagaattgttctgwggggaactattctctttcctctgttgtcatcctatcattgacctgactgagataccagagattgacaaactctcgggctgcagttatggtggcacttctctcatatggggttagtgtctgatctagcagtaacattatatgtctccatgtcagatcaaaggattgtcctaacccttgtaaaacatcagtatagccatcagggttatctgagaatttacctaggtctattataatttgcttcaagtctgagaggaaaaaggcacatgcactctgactgggccgaattctccagaatacatcttaggggcatttttgccttggggggaagtttcccatctgaaaaaaacaaacaaacaaacatagggacgccagcacccctagtaattttccaatggacattagtcttacagcgtcctctgtggtcctaatgcttattccttttcaggtcacccatagacctctgcttattggattagttacgctcactgatgtagcagtcctgcacctgttttcctgcctttcttgaccacaaagaaaggggtctgggctgctggattctagtggtcctttaccagcaagcctgacattgcctttgcactcaggggcgagttctaragctgggctgggttcctgagtatttcataataacccatttgccccatcaagatgcattcctacaaacaaccgttcttatgcaaattcatttcagagagggtgtgggtaaccttttgagtcaggattgagatagagttttttgattctgtaagtattttaaggcttggctgagtgcaaacagctcgcacgtttgagcagaccaattattaggcaattttcttaactctgcttctacaagagtttccctcaattattgaatacccattgtgttttttyctcaatcacctgggaggaaccatctattgtcctgtcctgaagggagtccctcctaggtctgttcagacatttgtatggtaattaagatttaaatcccctgttaggaaatctgctgggttaacggaattttctgtggttaatgttaaattatctttctctaacagaatagccccatactttaagatttttaagttagtaagctacctttttgcttttttgacttaggatagttctgaactggtgaggtgtgctcacaatgaggtttcctctaaaggctaattttctactttcttctgttagcaaagcagttgctgctacagaatgaatgcatttgggccatccacaggttcctgggttaaagattttttataggaagtctactggttatcagtggcctcagtgctttcaggctacatccttgtttacactgacaacaaagtggtattggagtgttatagggtcatggagaaaactttcagttatcaattataggttttaaatttaccctggcttttaaagaaatagggtacactattttttctttactacttctatctttctctttctctctttctttctcctttctgtctttgtagatggattttggaaacagtggaaggacattcgctcattgcccccatttgccactatatgaatatgtgcctcccttttatttactcaatttgctttcatcctgatctattatgttgttgtagacccagttccagttgttaaagtactgggttatcatttctaaggccctgacaagggtggtagggaatgggtcccacataactgctcatgtcaagagttgtatgcctaaattgggagggacaccagcgacaagactccctgggttcatagcctaggggcctaaggatgcagcatagatcttccttagatccctttggagatacaacctgctgtaatacttgggagaggaagtgaaggtctgaagcattagtatctaggaggcagggagaggaggaagtagattcagaggtaatgagaattttggggctactctttcaggaaagtcgtggtccagacccaggaggtatgggtcagaaggaaaggtaggggcacacgcatgggtgactgttgagtagagacttctggctgcaccatgatctcaaccggctaatgccgggagttcaggatgacagctttctgcctctagtcggccctcagcttccccagaaaaattgaaagcagaagctggttccaggcagaccaacactcccaacacagaagggttgggggttgttagaaagccctttcccagacagcttcccacctgagtcttaagttcagtggccatgctaatcgtttttaactggctgacaggtgcctggtattttcctccaattctaaggaaggataggacagaatagcaagcaaaagtagtccaatattactcaccactttggaggtcccttcatggtcaccaaatgttaccgggggatccttgctcccagagctcccaagatggtggcgggccacttcaaagatggtggcaagcctcgtgttctctgacctggggttcttggcctcacagattccaaggaatggaatgttgcaccatgcagtgagtgttatagctctaatagaagctgtgggtcatggaagagaaccatggaacccagcaactagtgttcagcttgataaggacgaacccaggcacttagccatgcaggaacagtggtgagtctttagcccgattgggagcggcaatgggcacctcgctggatcagtagtgtggcagacaccctgccagatccagagtggtggaagtaagtggcaagtctgcgatggcggcaaacagcagtggtggatggtgagtgaaagctcagctccagctgtatatcagagctcccataaaataggagggggcccaaggggggttgccccattttttaattttttaaaaaaatttttctctgactgtgttaatttaaaagaacagtctttaagctctgaaattctttcttctgcttcatctagtatgtcattaaagttttcaactgtattttgtaattcatttagtgactttttaatattcagaagttctggtttttcaatatatttatctcatctttcatatcctgaatttttaaaatttattttggttttcaactttctcttgaatctaattgaactaccttacaatctatattttcaattctttatctgtcatttcaaagtgttcattttggttaggatccattgctatggatatattgatgtcctttgggggtgtcaaaacaatctcccttattgtactgccagagttcttgcactggttccttctcatttgaagcagctgtcacttcttagttttgaaattgccattgtacagataaaaattcctcagtggtttgactgtaatggatgtcatgtatgaccttttgcctccatatctgggtgctttcaatgtgccaagggctctgtatgagttctttggctatatataacttttgtgtcgtggctttctcaaatgctgcttatcrtaatgatgcattggccatatgatctggcacactatcttctgtgagctgggagtgcagagctctcagaaagcttatcttgcacgttagcactatgctgtgtcagcaggtttttatttggtgggaagtttgctctacagtagagtaggggatgcgtaagagccagcttaccctggggtactctaatgaattatggaaacacccaccctgatggggacggtagagggagtgtttggtttgatatgctgagatcttaggggagggggctgcaccagcaacttgtcctggacaggaaggaacataatctgctttcctataatgcccctgacacagggatcataaccttcagttcagatatatgctgtcttttatctctagtccacaatgtgactgaggtttgcaggaaatgcccatctgccagttactgccaaaattgcctttgggcagacgtcttcctgcagcccaaaacatacagttctgtggctggtctgcactctgtggcagggatgctaccactctgtgtagagagaggaagatgaaccccagtcattgtttgagcccaggtggtgggcacacattcagtgtggatggagccactattaaaagtgctagacgancaaccacaaagtgcacttgcaccagcccccagtgggaaaagccttggctgcatctgtggcaatagatggggtggcaggaggtgatctctctacatttgttgccagtcactagtgctgcccatccactgagacagaaccatactctctcctgcattggagatcagcattgtacctgtgtttcctttgtcccaagtggtgctttggagggctctgctccccattcccataatggtggctcatgccaaaggctagatctctagggatcctgcagttccctaaggatctagtgatcctcttatttgtcgaagtcagagcagattctggggtatgtttgcagggtatctgttgatgcagtgaaataagagctgagattccatgggcaagatggtggcttatactgggtgcaaaacctttatggcaccttccacctgaatttgggttgaggaatcatgtgagtacaactgcaggagctcaccaaccagtgttctgcccccaggaagttcccacataaccattgagagtgttactcaggctcatgagggcagaggaactttccaacaatttgttggtcagcattctgtcacatgggtgaggggagcaaagtaataccctacctaacctgtccatggaactccaagctttttgggggccaatctctgccagatttttgctgcctttcttttctgtaccctagcttattctgtagctctctgagagtttttggcactcttccctcagctttccactcggggtgactgctcacccataactttgatctcttttatgaggagaactggcatttggcatctctagtcagtcatctaatgggaagcctggaaggggctcgcattggagaagctgctccaaactcgaatcagaaagacactaatttccttgtctgagaactggcaagtcttatgtttaaatcttcgatcyattttgagatgatttttgtgtatggtttaagataagggattaatttcattcttttgcaaatggatatccagatttcataaaataacttattgaagagattgttctttcttcactatgtattcttgttacttttgtcaaaagtttcttgactttatacacatggatttagttttatttgctttcaattctattcaggcaatgtgtctgttttgatgccaataccatactgttttgattactatagctttgtaatataattttaagttaggaagtgtgatgcttccacattattattattattattattttgataaagattgcttaggctattcatggctttttgtagttccatacaaattttaggattatcttttctatttatgtaagaaaatttcatttgaattttgatagcaaatgcattgagtctgtagatctggctgttaatgaagatattaacaatattaattttccaatctgtgaacatggaatatctttccattcttttctgcctattttaattttttcatcaatgttatatagttattaatgtacagactttctcctcttggttgaacttatgtgttagtattttaatcattttaattctattgtaaattagattatttcctgatttatttctaacattttatgtgaaatattaggatttttacgtatgagaacatgtcatctgcaaacacaattttgcattttcctttccaatttgcatgctatttatttatttatttatttatttatttatttatttgcctcattgctctggctaagacttccagtgacatgttgaatagaaatagccaaagtgaacacctttatcttattccttatgaggaaaagctctcagcttttcaccattgagtctgatgttagctgtgggcttgtgatatatgaccttgattgtgttgagatacatttcttctgtacttaatttgttgagagcttttatcacaaaaataatgttgaatcttgtcaagtgtatttttctttacatgtaatgaaatgatactatgatttttatccttcattctggtaatgtggtgtgtcatgtttattgattttcatatacagacttgtgtcccttaactatgggatacatttgtagaaatgcattgttagacgattttgttattgtgtgaacaatatagagtgtacttacagaagcatagatggtatagcctactacaaactttggttatatagtatagtctctagttcctaggatactaacatatacagcatgttactgtactgaaaattgtaggcaattttaatacaatggtaagtatgtgtttatccaaacatatataaacatataaataatactggtattataatattatgcgaccaccatcataaatatggttcattattgaccaaaacatcatatgcagcacattgttgtattaaaacatctatgcatcccagggatgaatctcaattaattgttttgtattatccttttaacatggttgaattaggttttctggtattatgttgaagatttttgtgtttatgttcatctcagatatttacctgtaattttattttttatctggccttgatatcagggtaatgctgggcttgtagaataggtctgtaatttttttcctcctctttgatttttctgaagagtttgaagatcgtcattaatttttctttaaatcattggtaaaattcactagtgaaaccatcaggttctgggcttatctttttttgggagagttgattacttatttaatctttttattcattattggtgtgttcagactttcagtttattaatgactcagcctttgtagtttttatggtgtaggttctatgtttctaggaatttacttatttcttataggttatccaatctgttgacatataattgtttatattagtctcttacaattttttacttctatgtttccacttgttatgtctacttgtttattttttattttatttatttgagtcttttctatgttttcttaggtagtccagctaatgttttctcaatgttgttcttcagttttttaaaaaaaatcttagtttttttcagtattacattatttctactctgatatttattattttcttccttatgtttactttgggcttattttggcctcttttctagtttcctgaagtgtgatgttaggtattttatgtgtattctttcttgtatcctaatgtaggtgtttattgccataagtgctcccttagaacagcttttgctacaactcataatatttggtgtgttgtgtttttgttttcatttgtccaagatttttttttaatttccttttattagttgacccattttttttcagaaggatatttgtttatttctacataatggggagttttctaattttctaaattgatttttagtttcataacattgtggctgaaatgatacttcatacgattttgatgtttttaaatttggtaagacatgtattgtggcctaacaaattgtctgtcttggagaatgttccatgagcacttgagaagaatgtgtgttctgctgctgctagatggaatattctttatattccagttgggtcgatttgttctcaagtgtagtttaagtccagtatttccttgttgatattctctccagatgatctatacattgttgaaagtggagtgttgaagtactgtacaattattttgttactctcttcagatctattataatttgctttatgtagctatatatatctcatcaacattggaccatataactatataaagcaaattgtaatatcatcttgaataatagactgttttatcattatataataacctcctttgtctcttgtgggccttattttttacttcaactatatyttgcctaagtatagccacctctgttactttttgatgctgcaatttgcatggaatatatttttctatctctttattgtattctgcacctctagaatttcttttcctttctcttttatttaattgtttgtatctctttgttgtacttctcattttgtttgtgtatcattttcctgaattcatttagttgtctctatgagttttcttgtagctcgctgagattctttaaagtgattattttgaattctttgtcaggcaatttgtagttctatatttctttggggtcagtcactggggctttattttggtccttcaattctttcatatttccttgatcctttatgttccttggaggcttggattgttgtcttcacagttgaaaaagcagttatcttctctactgtttataacaggctttggggaagaaagatctttaccagtgagcccagccagatattctgggaggcgttcagaccttttccatggatgtgccttcttcactcttcttaattattcttagggggaaagactgagtattgtttaccttctctctatgctgcaaagcgagacctggtgctctgaccatcccatttattttccctaaagcagtgtgtcctgagttgttcaagtttatatgccctctctcaatccagaagattcaagctgactgttaagattctgacctgattatgagatccatatgctatttattgttctcatgtgagtcatgcacagagatgtgtggggtgctttccactggggaggaaggaagcttggggcacatgttggctgcgtgtggggtcctcaggtaagtcaccctgcagggcttatggacaattttcttggtggagtccatgtactggtaagtagtattcatgactgattattgtgtattgcatgctggctcttatgtgtttcctctccttttcactgctcctagttaactgcagagaattcagctttgctgatgtactctgttttgagtggggcaagagagaaggtcatctcctgggcagtattctgcatggccggggaagctgtgtctccaactttaatttgtgggagaaatttccttttccttgggcctcttttggcaccaagctctgttaccttagggtagaggtgatacagttaatgggaaactacttctcttaccctcttcaacatatttactcttggagttttttgttccaccagggtgctacacctagaatcgaaagctcccacaacattattatttttaatgaataaattaaattatttttcayctgcaactattcctatgggagtattactcttttaaaattttctttatcttaacagatacatactagttgtacatatttatggggtacatgtaatatttcgatacaagtatacaatgcataatagtcaaatctagtaattgggatatccattgcctaaaacatttattattactttgtgttagtaatattccaaatcgactcttctagttattttgaaatatagaatacattgttgataactatagtcaccttattgtgataccaaacactagattttattctttcttttttttaaattatattttaagttctgggatacatgtatattttaagttctgcggaatgtgcaggtttgttacataggtatacacatgccatggtggtttgctgcacctaacaacctgtcatctaaattaggtatttcttctaatgctatccctcccctagcaccccaccctatgacaggccccagcatgtgatgttcccctccctgtgttcatgtgttctcattgttcaactcccagttatgagtgacaacatgcagtgtttggttttctgttcttgtgttagtttgctgagaatgatggtttccagctacatccatcttcctgcaaaggacatgaactcatccttcttttctggctgcatagtatttcatggtgtatatgtgccacattttctttatccagtctattattgatgggtatttgccttggttccaagtctttgctactgtgaacagtgctgcaataaacatatgtgtgtgtgtgtctttatagtagaataatctataatcctttgggtatatacccagtaatgggattgctgggtcaaatggtatttctggttctagatcctcgaggaatcaccacactgtcttccacaatggttgaactaattgatactccaaccaacactgtaaaagcgttcctatttctccacaccctctccagcatctgttgtttcctgacttgttaatgatcgccattctaactaacatgagatggtatctcattgtggttttgatttgcatttctgtaatgaccagtaatgacgagctttttatttcatatgtttgttggctgcataaatatcttctagtgagaagtgtctgtttatatgcttcacccactttttggtgaggtttgtttttttcttgtaaagctgtttaagttccttgtagattctggatatcagccctttgtcagatggagagattgcaaaaattttctcctattctgtaggttgcctgttctctctgatgatagtttctttgctatgctgaagctctttagtttaattagattccatttgtcaattttggcttttgttgccattgcttttggtgttttagtcataaagtccttgcccatgcctaagtcctgaatggtattgcctaggttttcttctaaggtttttatggttttaggtcttacatttaagtctttaatccatcttgagttaatttttgtataaggtgtaagtaaggagtccagtttctgttttctgcatatggctagccagttttcacagcactatttatttaatagggaatcctttccccattgcttgtgtcaggtttgtcraagatcagatggttgtagatgtgtggcgttatttctgagacctctgttctgttccatttatctatatgtctgttttggtaccatgctgttttggttactgtagccttgcagtatagtttgaagtcaggtagtgtgatgcctccagctttgttcattttgcttaggattgtcttgactgtacaggctcttttttgtttccatataaaatttaaaatattttctaactctgtgaataaagtcaatggtagcttgatggggatagcattgaatttataaattactttgggcagtatggccattttcatgatattgattctttctatccatgagcatgggatgtttttccacttgtttgtgtcctctcttatttccttgagcagtgatttgtagttctccttgaagaggtcattcacatcccttgtaagttgtatttgtaggtattttattctctttgtacaaattgtgaatgggagttcactcatgatttggctctctgtttgtctgttattggtgtataggaatgtttgtaatttttgcacattgattttgtatcctgagactttgctgaagttgcttataagcttatggagattttgggttgagactatgggctcttctaaatatacaatcatgtcatctgcaaacagagacaatttgacatcctctcttcctatttgaataccttgtatttctttctcttgcccgattgccctggccagaaattctgatactattttacacaggagtggtgagagagggcatctttgtcttgtgccagttttcaaataartgcttccagcttttgcttttgcctcgtcagtatgatattggctgtgggtttgtcataaatagctcttattattttgagatatgtttaatcaatatatagtttattgagagcttttagcatgaaagggtgttgaattttatcaaaggccttttctgcatcgattcagataatcatgtggtttttgtcattggttctgtttatgtgatggattacatgtattgatttgtgtatattggacaagccttgcatcccagggatgaagctgacttgattgtggtggataagctttttgattcgctactggattcagtttgccagtattttattgaggatttttgcattgatattaatgaaggatatttgcctgaaattttcttgttttgttgtctttctgccaggttttggtatcaggatgatgctggactcataaaatgagttagggcggattccctctgtttctattgtttggaagagttacagaagaaatggtatcaactcctccttgtacctctggtagaatttgactgtaaattcatcttgtcctgggctttttttttttttttttttggttggtaggctattaattactgcctcaatttcagcaattgttattggtctattcagggatgtgacttctttttggtttagtcttgggagggtgtacgtgtccaggaatttatccatttcttctagattttcttgtttatttgcatagagatatttatagtattctctgatggtagtttgtatttttatgggatcagtggtggtattcccttcatcatttttattgcatctacttgattcttctctctttccttctttattagtctggctagcagtctatatattttgtagatctgtacaaaaaaaaacagctcctggattcgttgatttttcgacaagttttcatttctctccttcagttctgcactgatcttagttatttcttgtcttctgctagcttttgaatttgtttgctgttgcttctctagttcttctaattgtgatgttagggtgtcgattttagatctttcctgctttctcctttgggcatttagtgctataaatttccctctaaacactgctttagctgtgtcccagatattctggtacattgtgtctttgttctcattggcttcaaagaacttctttacttctgctttaattttgttattttcccagtagtcactcatgagcaggttgctcagtttccatgtacttttgcagttttgagtgagcttcttaatcctgacttctaatttgattgcactgtggtctgagagactctttgttttgattttcattctttttcgtttgttgaggagtgttttactttcaattatgtggtcatttttagaataagtgtcctgtggtgttgagaataatgtatattctgtttatttggggtggagagttctgtagatgtctgttaggttcacttggtctagagctgagttcaagtcctgaacatccctgttaattttctgtgtttttgatctgtctaatattgacagtggggtgttaaagtctcccactactattttgtgggagtctaagtctctttgtaggtctctaagaacttgctttatgaatctgggtgctcctgtattgggtgcatatatatttaggatggttagctttacttgttgcatttatcactttatcattatgtaatgcccttctttgtatttttttaatctttgttggtttaaaatctgttttattagagagtaggattgcaacccctgcttgtttttgctttccatttgctaggtaaatattccttcatccctttattttgggcctatatgtgtctttgcaagtgagatgggtctcctgaatacagcacactgatggctgttgactctttatccaatttgccagtctgtgtcttttaattgggacacttagcctgtttacatttaaggttaatattgttatgtgcgaatttgatcctgtcattatgaagctagctggttattttgctccctagttgatgaagtttcttcatagtattgatggtctttacaattttgtatttttttttgcagtggctggtacagttttttcctttccatgtttagtgctttcttcaggagcttttgtaaggcaggcctggtggtgacaaaatctctcagtatttgcttctctgtaaagaattttatttctcctttgctcatgaagctttgtttagctggatgtgaaattctgggttgaaaattattttctttaagaatgctgaatattggcccccactctattctggcttgcagggtttctgcagagttctgcagtttgtgtgatgggcttctttttgtggataacctgtcctttctctctggctgcccttaacattttttccttcatttcaaccttggtgaatctgacgattatgtgtcttggggttgctctttttgaggagtatctttgtggtggtctctgtatttcctgaatttgaatgttggcctgtcttgctaggttggggaagttcgtcttttaatattctgaagagtgtttttcaacttggttccattctctctgtcactttctggtacaccaatcaaacgtaggtttggtcttttcacatagtttcacatatttcttggagactttgtttgctttcttcattctttttttttctaatcttgtcttaacgctttattttattaagttaatcttcaatctctgatgccctttatctgcttaattgatttggctattgatacttgtgtatgcttcacatagttctcatgctgtgtttttcagctctgtcagatcatttatgttcttctctaacctggttattctagctagcaattcctctctctttcaaggttcttagctttttttgcattgggttagaacatgctcctttagtttggaggagtttgttattaaccaccttctgaagccttcttccatcaattcatcaaactctttctctgtccagttttgttcccttgctggtgaggagttgtaatcttttggaggagaagcagtgttctggtttttggaattttcaggctctttgtgctgttttttcctcatcatcatggatttatcttcctttggtctttgatgctggtgacctttggatggggtttctgtgtggatgttctttttgttgatgttgatgctatcccttttggtttgttagtctattttctarcagtcaggcccctctgctgcaggtctgctggcatttgctggaagtccactccagaccctgtttgcctggttattgccagtggaggctgcagaatagcaaagattgctgcctgtttctttccctggaagctttctctcagcggggcaacttccagatgccagccacatgtgtcctgtatgaggtgtctgtcgacccctgcttggagctgtctcccagtctggagtcacagcagtcagggatccacttgaggaggcagtctgtctcttagcagagctctagtgctgttctgggagatctgctgctctcttcagagtcagcaggcaggaacttttaagtctgctgaagctgggcccacagccgccccttcccccaggttctctatctcagggagatgggagtttaatctgtaagctgctgactggggctgttgcctttctttcagagatgcccttccaagtgaggaggaatctagagacrcagtctggctacagtggttttgctgagctgtggtgggctccccccagtttgaacttcctgaaggctttgtttacactgaggggaaaaccacttactcaagccttagtaattgtggccctccctccccccaccatgccagagcatgccctatcgacttcagactgctgtactcacagtgagaatttcaagccagtgggtcttcacttgctgggttccatgggggtggaattcggtgagctagaccacttgtctgcctggcttcagccctttttccaggggagtgaacagttctgttttcctagtgttccaggcgccaccgggctttgagaaaaaactcctgcagctagctcagtgtctgcccaaactgctgcccagtgttttgcttgaarcccagggccctggtggtgtaggcacctgagggaatctcctggtctgtgggttttgaagactgtgggaaaagcgtgttatctggggccgtattgcaccatccctcatggcacagtcccttatggcttcccttggctaagcgagggggttccctgaccccttgtgcatcccaggtgaggtgacaccccaccctgctttggctcatcctccatgggcttcacccactgtctaaccagtcccaatgagatgagccgagtacctcggttggaaatgcagaaatcacccaccttctgcgttgatctggctgggagctgcagaccagagctgttcctatttgaccatcttgcctgcccccttttattctttcaaagtatatatatatatatttattattattatactttaagttttagggtacatgtgcacaatgtgcaggttagttacatatgtatacatgtgccatgccggtgtgctgcacccattaactcgtcatttagcattaggtatatctcctaatgctatccttcccccctccccccacccaacagtccccagactgtgatgttccccttcctgtgtccatgtgttctcgttgttcaattcccacctatgagtgagaacatgcggtgtttggttttttgtccttgtgatagtttactgagaatgatgatttccaatttcatccatgtccctacaaaggacatgaactcatcattttttatggctgcatagtattccatggtgtatatgtgccacattttcttaatccagtctatcattgttggacatttgggttggttccaagtctttgctattgtgaatagtgccacaataaacatatatgtgcatgtgtctttataacagcgtgatttatagtcctttgggtatatacccagtaatgggatggctgggtcaaatggtatttctagttctagatccctgaggaatcaccacactgacttccacaatggttgaactagtttacagtcccaccaacagtgtaaaagtgttcctatttctccacatcctctccagcacctgttgtttcctggctttttaatgattgccattctaagtggtgtgagatgatatctcattgtggttttgatttgcatttctctgatggccagtgatggtgagcattttttcgtgtgttttttggcagcataaatgtcttcttttgagaagtgtctgttcccatccttcgcccactttttgatggggttgtttgtttttttcttgtaaatttgtttgagttcattgtagattctggatattagccgtttgtcagatgagtaggttgcgaaaattttctcccaatttgtaggttgcctgttcactctgatggtagtttcttttgctgtgcagaagctcttgagtttaattagatcccatttgtcaatttaggtttttgttgccattgcttttggtgttttagacatgaagtccttgcccatgcctatgtcctgaatggtaatgcctaggttttcttctagggtttttatggttttaggtctaacatgtaagtctttaatccatcttgaattgatttttgtataaggtgtaaggaagggatccagtttcagctttctccatatggctagccagttttcccagcagcatttattaaatagagaatcctttccccatttctkgtttttctcaggtttgtcaaagatcagatagttgtagatatgtggcattctttctgagggctctgttcttttccattgatatatatctctgttttggtaccagtaccatgctgttttggttactgtagccttgtagtgtagtttgaagtcaggtagcatgatgcctccagctttgttcttttggcttaggattgacttggcsatgtgggctcttttttggttccatatgaactttaaagtagtttttttccaattctgtgaagacagtcattggtagcttgatggggatggcatcgaatctataatttaccttgggcagtatggccattttcatgatattgattcttcctacccatgagtattgaatgttcttccatttgtttgtatcctcttttatttccttgagcagtggttcgtagttctccttgaaaaagtccttcacatcccttgtaagttggattcctaggtattttattctctttgaagtaattgtgaatgggtgttcactgatgatttggctctctgtttgtctgttattggtgtataagaatgcttgtgatttttgtacattgattttgtatcctgagactttgctgaagttgcttatcagcttaaggagattttgggctgagacaatgtggttttctagatatacaatcatgtcatctgcaaacagggacaatttgacttcctcttttcctaattgaataccctttatttccttctcctgcctaattgccctggccagaacttccaacactatgttgaataggagtggtgagagagagcatccctgtcttgtgccagttttcaaagggaatgcttccagtttttgcccattcagtgtgatattggctattggtttgtcatagatagctcttattattttgagatacgtcccatcagtacctaattcattgagagtttttagcatgaagggttgttgaattttgtcaaaggccttttctgcatctattgagataattatgtsgtttttgtctttggttttgtttatttttgttcacagtaatcaacctgcattatttccccttcccagtactcttcccagcctctggtaatcaacattctattcattaccttcataagattaacattttagctccaacacatgagtgaaaacyattatcaagaagccacaaaggtgtttttggccgggtgaagtggcccacacctttaatcccagcactttgggaggccaaggcaggcggatcacaagatcaggagtctgagaccagcctaaccaacatggtgataccccgtctcttctaaaaatacgaaaattatccaggtgtggtggtgtgcgcctgtaatcccagctactcagctactcaggtgggtgagaccrgagagttgcttgaacccaagaggtggcggttgcagtgacccataacataataccatagactgggttatttaagcaacagaaatttattttttcatagttttagagggtaggaatctgatatcacggtgccagtatggtcaggttttggtgaaggctctcttcctggcttacagatggccaccttctcacaaggctcagggaaatagaataaatacctctatcttcttcttataaggccacagtcctatcatattaaagcctcactcttatgatctcattaaatcttaaagattatctctagatacagtcacattaagggttagggttgcgacatataaatttggtgaaagaagggacacaatccagtccgtaggagtgaaaatgtggtaatagtgaatttgttgagcgtgggtccattgacacacttcatttgctgtgaaatgagttccttgattagaagaggcattatgatggggaaataaagcaatgttttcccaataagtctagagtagttgctacttcttacctactaaatccaatgagaattatgttgctgatttaatggaccagtgcaatgccttgtgtaaggaaaaggcaaagtcctacaaactaaattattgcaaggagctgaagagtcctgctcctgaggtacgatattgtattgcttgctttgttagctgaaacaaactgcttccggctgtctttactaacagacataggaaaaaaaaaacattcttttagtcaatagctctmtaccagataccaggggatgtgttaatttgctctagcagtgaacccacatttggcacaacagctgtttggagttatcatctcatcaagctcacaataatccattgtcattctccaggatccatctgttttctgcacaggccaaataggagatatgtgagttaaatggggatgtgatgggaattaccacccctgcatcctttaagttcttgatggaactggtctttgcaatccctccaggaaggcagtactgattttggtttactattttcctagataggagcagttttagttgyttctatttatcctctaccatgacaacagcactcactccataggtcagggaagtgatgtgggaaktctgccagttgctgagtatatctattcaaattatgcactgcagagctgaggaaataatcgcaagatggtttcatggactcwctgtacacgctgtgaaatgaatgtcagctaaacctatgatctgatggtctgacagagattttgtctcttctgcctgtccactgagctcaggttcactccattgttccttctcttctgctccaggaggcccaggtgtctatgccattgcctctgtccctctgtggcctacaggtgataaaagatttgcagggaggacacaaggacactctgggaggctggaaatgattatggattagaggctttgttatcacaccacacccacctgaaaatagcaaaatagcaggtagagagtcacactgtaaaattttatccaagaaggaacatgagagctggacataaaagtgaaataaacttcagaaactttaaaaattttagccagcagcagcccatgctatgggtgggtccaatggaaatttgtgagtgagtcaccagtgtgtaagagggrgagagaatttctctctgatacatattttcattggggaactgggaaatccaggccacgagggagctccttgatcctaccaagcacaggatctgacttggtgagccgtgaggaggctatgaggagtggcattgggaagtgctttgtgtgcacttctatactctaccactaatagaaggaggacatttctaatcctaactcatagagaactgcacggaaatctactatccagaatgggtgaaagtctccggtttggcaagtctctggactgagatttgcaatctagtctcatgtggggaaggagacttcatggacagaactgagaggtgagtgtggcatgggcatgagctgcaggtgcagaaattgggagctcttcccttggcaggactagaccagcatggatgtggcctgggagcctcagttttgttccaatcagggagttcggcagcctgggacaatttaatgatctgaaggcaaactgtttgtgtctcgtctggctgttttagcttgctgccaatggtaggttgcaggagagagctccaccaggttgagagtgtggaagcaatgtgggacccactgccacatgctagggtttgaattcaaagctgcccctttcttcatgcatgctctttggcacagcagaggttccttcactccttcctggagcattgccccagtggtgttagaattgctatctaactcctgtctgggctggtgcttgtgcgtgccattggggagcctaagcatggacttgcctagcccagtcccactcagctttgcccctttcacctgccttggatacagacaacaggaccacgcccccagggagctctatagcctagcccattttctgagatatctgagtatttatcctggtaaacaaagctcaagcttgaaccccacagccacgaccacagctggctctcacctgaaagtaccacctaatgaacaggaggacaaactgcatagtccattacaacatcggccgacacaatagcatagcactcagaaaggagatatgatctgtgtgacatctgctgccttcattgcccacacaaccccagctactcagtaggtcttgaacccacttacccacctggtacattaagactacaattggcatttgagaaagccaccacactgaggctatttatgactaagaaaattaaacaaattctacactactcccctgctactccagtcagtcctttttttggtgtccaccactgaaggacgtgaggacaggtttgcctcttcaaattctgcacagcattaccccatctctggggctgagcatagaacccaggccactgggcatttcacagactactccattgcttgaggcacaggagatcttctccgtgtaaacaaagacccctactgcttctgccacagctggctggctcttacctgtaagcaacacctacagccctgaagtttgaactaagcaacccaatataaaatcagctgacacaagcttgaggtatagagaaaaatatctgggaaccagtcccagataaacttcccaagacctctgccaccccagagacacaggagaacataagcctattcacatattcagtacactgctactacaaccagcatttgagaaacacattaaaactgtctataaccaaggaattcttatagagtgcttaccactaaaaacacttagaagcaaagccaaacaaccctactcaacaaacattatagtcatatctccaaagggaataaatatggcctttataagcaaaagtaaatttaaaaataacaagagaaaatatctccagatgaggagaaagcagtgtaacaattctggaaatatgaaaaaatgtgggtgttatgacattcccaaacaagcacaccaacttggtagcaatggatcctaatcaaaatgaaatttttgaaataccacgtaaagaattcaaaacattaattttaaagatactcaatgaaatcaaagagaaagctgaaaagcaatacaaagaaataaaaaatcaattaaggatataagtgagaaatttaccaaaaagatagatattaaaaaacaaaaaaaatctgaaaataaaaaattagaaaggaattacaacatacaattaaaaccttcaacagtagactaggccaggtagaataaagaatctcagaacttgaagataggtctttcaaattaatccastctgacaaaaaaagaaatagtttcaaaaaaagccttcaaaaagtttggaactatgtaaaatctccaaacctatgaatcgtaggtattcccaagagagaataaaaaacacaacaagattgcaaaatctattcgaggaaatagttgagaaaagcttccctagtctagtaaaaggtctagatatccagatacaagagactcaaggaattctggaaaaattattgcaagaaagtacttaccatggcatataataaccagactacaattgaagtgaaggaaaaaatcctaaaattagcaacagaaacgttttgagtcacctataaaggaaagcccatcacataaacagcagacttctcaacagaaactttataagcctgaagaaattgaagttctatttctagagttcttcatgaaaaaaacacttttaaatacgaattttgaatcctgctctaatgtttataaatgaagaaatgaagtattttctagatgaacaaatgctgagtgaatttatcatgactatactcgttctacaggaaatgctgacagagttctaaataaggataaaaaagtcaatactctccatcataagagcacacaatagtataaaactcacaggccaaagaatatacgaaaaaactagataacaattaagattatgacaggaacaaaacgtgacacatcaatatcagccttgaatgtgaatgaattaaatactccacttaaaagacacaattggcagaatagatgttaaaaacatgatctattattttattcttgaaaaagactcaccttactcataaatacaattatagactgaaggtaatgggtgaagacagatgttctgtgcaaacagacaccaaaagtaagcaagagtatcatgtgtttcatatgtttataactggcttttgtaataaggtgatactgacatcatagaatgagatagaaataatcccttccatattgattttatacctatgtcagttaaaactggctttaaatcaagaacagtaaaaaaaggtcagtatataatgataaatggatcaattcaacaagaagatgtaataaatcctaagtatatatgcacccagaatcataaaacaaatattactagaactaaggaaagatatagcaatacaataatagctggagacttcaacactccagtgacagcactacacagattatcaagccagaaaaaggaaaaacaaatgcaagagttaaactggacgttagaccaagtagacctaatagacatttaaagaacattctcaacaaatttagaattcctccaatcggctcatggaaaattctccaggatagaccatattttaggccacaaaacaagcctcaataagttttaagaaatcaaacttataaaaaatatcttttcagaccacagtggaataaaactagaaatcaattccaaaaggaacccttgaactgtaaaaatacatggaaattaaacaacatgttcctgcataatctttgagtcaatgaaaaaatgtagacataaattaaataatatttgaaacaaatgaaaatggaaacaamacatacctaaacctttgtaatacagcagaactggtatttacatggaagtttataatgttaaatgcctacatcaaagtaataaaaagactacaaattaacaatctaccatcacaactcaatgaaccagaaaatatgaacaaaccaaacccaaatctaatagaagaaaaataacaaacatcagagcaaaactaaatgaaatttagagcaaataaacaatattaaaaagcaatgaaatgaagtttatttaaaaaaataatgaaaattgacagaactctctctagaataaccatgagaagaagagagatgattcagataaacacaattggaaatgaaaaaggaggcattataactgatatcacaaaaataagataactagagagtagcatgaacaactctatgctaataagcaagaaaaactagaggaaatggataaatttctggaaacatacgacctcctaagattgaaacggaaaaaaatagaaatcatgagcagatcagaaatgagtactgagattgagtaataataatattaaaaaacttcccaacaaagaaaggcccaggaccaaatggatttacagctcaattctacccaatgtgcaaagcagaacttattccagtcctactgaaacaatttaaaaaaaaaatcaatatggaagggattatttctatctcattctatgatgccagtatcaccttattaacaaagccacatataaacatatgaaaatagaagagaaaagaaatctacaaaccaatatcccagataaacatagatgtgaaaatcctcaacaaaattttaactaactgaatccaacaccacatcaaaaggataatacatcatgatcaagttggttttaacccagagatgaaaggatggttcaacatacacaaatcaataaaagtaattcaccacataaacagaattaaaagcaaaagccatatgatcatctccatagatgcagaaaaaaattaatagaattcagcataactttattataaaaactctttaaaaactaggcatagaaggaacgtacctcaaagtgataaaaaccgtatataagaagcccatagccagccttatactgaatggggaaaagttgaaagcattctttctaaaaactgaaacaagacaaaaatgcccattttcactgctccttttcaacgtaatactggcaattgtagccagggcagtcaggcaagagaaagaaataaaagccctctgaatttaaaaagaagtcaaattatttctgtttgctgataatatgaccttatacatagaaaactttaaagactctaccccaaagactcctagatttgataaatgaattcagtaaagtttcaggatacaaaatctatgtacaaaaattactatttaccagtaataatcaagcttagaaccaaatcaagttgtcagtttgttagcatttacaatagctgtaaaaataaaatatctggaatgcatttaaccaaggaagtgaaaaatacctacaaggaaaactatcaaacactgattaaaggaatttgagatgacaaaaataaattgaaaaaatcttatgctcttgaataagaggaatgaatatcattaaaatgtctatattatctaaagcaatctacagattcatttcaattctcatcaaaataccaatgtaattttgcacagaattagaaaaaaatcaccaaattcatatggaaccacaaaagagcttgcatagccaaaacaatcctatgcaaaaggaactaagtcggatgcatcacattacctaatttcaaattatattacaaagccatagaaactacaacagcatggtattggtataaaaatagacacatagatcaaaagaatagaagagagaacccagaaattaagccacataactacagccaactggtcttcgataaagtcaacaaaagataggctgtgaaaacaacatcctattcaaaaagggttcttggaaaattaggtggccatacacagaagaataaatatggacctgtatctctcaccatatgcaaaaattatcacaaatgtattaaaggcttaagtgtaagaccaaaactataaaaatacaggaagaaaacagggaaaactattctgaacatcatttttggcaaagacatcatgacaaagaccttaaaaacaaatgcacaataccaaaaatagacaaatgggacttaaactaaagtgcttctttacaacaaaagaaattatcaacaaaataaacagamaacgtgcagaatggaataaactatttacaaacaatacatccaataaaatattaataactaggttccacaaagaactcagacatctcaacaacaacaaataattctgccaaggccaggtgcagtggctcacgcctgtaatcccagcactttgggaggccgaggtgggyggatcacgaggtcaggagatcgagaccaccgtggccaacacggtgaaaccccatctctactaaaaatacaaaaaaaaaattagctgggcgtggtggcgggtgcctgtagtcccagctacttgggaggctgaggcaggagaatggcgtgaacctgggaggtggagcttgcagtgagcccagatgacgccactacactccagcctgggccatagagtgagattccatctcaaaaaaaaaaaaaaaaaattctgctaaaatgtaggcaaatggcataaacagactttttcaaaagaagacatacaaatggccaacaaacacataaaaaactgcttaacattattaatcaatgaaatgcaaattaaaatttcgattagctattgtattacaccacagtagctattactaagaagtcaaaaaataacagatattggcaagtatggagaaaaaaggaagcactcataagctttagtagaaatattaatgaatataacttgtaattaatacaatacatagggttctcaaagaattaaaaatagaactaccattctatgcaataattccactactggttatctaccaaagggaaataaattttatacaaaaggatatctacactcatgtgtttataccagcattattcacaatagaaaagatatagaatcaactaaactgtcaatcartggattatcggataaagaaaatgtggtgtatatatacaatggattgtattcagccattaaaaaagagaataaagtcatttttttttttccagcaacatcaatggaactggaggccattgtcttaagtgaatggtttggaaacagaaaggcaaataccacatattttcacttataagtgagagctaaataatgtatagaactggacataaggagtaaaataatagacactggagactcaaaaggatgggagggatcagagggggtgaaggatgaacaattacttagcggatacaatgtacattattaggttgatggctacactgaaaccccagacttcaccattatgcaatatatccatgtaacaaaactactttctcctaaattataaatattaaaacaaaaacaaaaacacctctattgttcacctgacctccataagccactattctgattgtagactatagtgtcattttaggtctcctggcattagtatcagttcaggacctgtgtccaatattctccaaaacttctgattatttttccctaattcttccatgccataatttattttggggaaagctgtgagaaagattgacattatatgttgttgggcgtgtggtgggatgcttcttccaggggacccattcttcccttcattcaagggttgtgagtctgtaaactggctcaagcctgggaattgattgaagggccatgactctgttttatgttacaagctagaattttgttcaattgacctaggactcctctgcttatacagatttagtaagaatataatggaattattatctgtctcactactagaaacatgattaactaacaatgtcataggtctgcatcagtcagattattctgattgctgctttgactcttctgcttatgtagtttttgtcagttaagtgctgccacttttcccctgccacttgggaatccaattatttctattaaatttattttttttagtttaatggtatcaatccatgtaatttctgacctacagagaaaagtgatcttcaaagacgatagggttcccacaaaaatttatttctcgtaattgtggctaagaattgttctcagtactctcccaaggtcggggagaagatcttaaatgataaatgtcgctaagaatttggattctttcctctacagtatgtcaaggcaggactggaatttcaacttcatttagtgtaggacaccttttggtctatgtgtttctaaactttttttagagtattttctgacacactgagctgcaacactaaatcgagactctctccttcttgggctcatatcaatacatttggcctgtttcaggtttgtgtttcttccacaattatccatacttttaatatccattgtcatacgtattccctggatttatgtctatataaattagaaaaataaacatgacctgacaagacttgagtctagttataggtctagaagcaaagaagggtggtatggtgggtcctaacaatgatcagcagtgtcttacttctgcttcttctcagagcttaagttgtattttatttcgctgcatgtaatctcttgctcacaggtacccagatatctgcagtaacccagcaatccatttgtgcaatagcttccaccactgctctaagcattttccagcctacagtctaaactatgctatcattccagttagtattccaagtcagaaaagacacaacagtccctcagactgtccccagagaagctagaactttacaagcaagttccattyatattctttcattccaatggaggaaccaataatttgatggattctttcagacactcagtgctgtgttagagagggagtgggacaagggcaagcagaaatgacatgaaattttctagcatttccttggttgcttcagcttcttagcttgtttcaagagttctcacaaaactactttgctctatatattttggggtgttttgttttgtttttgtttttttgtttttttgtttttttgtttttttkttttttttggtgtttccatggggcaatgagggcctggcgctttctgctctgccatcttgctgatgtcactcttcagtagtatctcctcttctcatcatgtttgtctgtttttatatctttcttttataaggttgtggttcaccttgaaactattctaggagcctcagttcaacatgttaaactgaagaaaatgaagtactcttttcagttgtggatcgcaatgatgtcagcaaagggacatgatgggaaggtatttttacctctttctttacttacttttttctttgtgtaaacatttattgagcttctattgtggtccatatgttagaggtgtagagaaaagaaactcatgaaaaaaataagtaaaatagtaaaatatttaaagaaagcacagtttggtgaatgcctatacggaataggcatatatgctattcacagagagtgtgcccattcctatatggaaatcagtgaaggcttcttgatggaggaattgcagtctcccaaatcttgaatgatttggaaaccttaaccaggtagagaagagataaagattatgccaggcagaggggaaaccacggcaagaacaaggacacaggggaatgaagctaatcttagtatgttgtatgctaggtactcagaacatgtaggtttcaataaagccttaagtgattaggtaacttcagttgtcaagttccacctttaccttccccctgagatgttttaaaaatacatgtacagagctatctgcccatctcctgtttatttttcccttccttttcatatctgctatgattagaagctgatacaggtacttgtgaaagaagcttcccttatgccaggttttttcaggcttgctgaagacttttaatatgaacactttgagaactataagataaattcaacattctggagaatttaacttttgtgaatataggaatgttttctgccaatgggaatatttgtgttagagcatgacacatccaaatttgaagtgcaggctacctcctagttttgttatcttgggcaagttacttagctattctgcagtttactcatacgtaaaattaagctattgatacccattttacagctttattttgtggattaacaatattttttataagatatctcacatacaatagcccttccataaggcagaactcacacgaccctctctaccttaaaaaaaaaaaaagtcacttttaaaattttttcaaatacccagttttctttgcagaaacactttggaaatctctcagaacaaaacgtttatacaaattcacaaggggaggaggtttggctctgagatgaaagtttataatcagaactttagatcaaaactaaagctgaaatcaaaaacaaaaagtttattttcagttcacttccagaagacactgtcttataatttggataaactgttaacatacatgctgactgtcaaaactggtcctgtaattacaaatctggaaagaaaaagaggggggaaaaatctgctctcctcttacttttttatgataccagatttagagctgggattatgatgccagatttagagctggtggtcataaccactttaccatgttgctcattaataatcacttaaaataggtagaaaagggatgtggccattttctaacccatactttttatgttaatgtagctcttttttaattacaaacctaatttaaaatttttaaattttgtgactacataatagttgtatgtatttatgggatatataagatgttatgacacatacatacaatgtgtagttatgaaatctgtaactgaagtatccaacagtttaaacatttattatttctttgtggtgtaactttccaattccactctcttgttttataatatacaacaaagtactttaaactatagtcacccaattgtgctatcaaacactagaccttatttcttctctttttatactcaataatcatccccacttctcttgcagtttcttgtgcatttgcactataacatttatttctttttatactatctcttaaaaaatggttgtagttattatcatagtcatatcttcaagaayaaaattccacattcaatgaaagtaaattcaaaaataagaacaatcccctattcccctggttgctcagaaatcaacgtatagatgcagaaagcctgaaaaagaaatgtactataacactctcaaattaaaacaataattcttcagcaatagactctgtgcaaaagaaatcttcaaaatgccagataaggaaatcaaaatattgactttaaaaaaggcttaatgaaattaaattgatttttttttttttttttttgagacagagtctcactctgttgcctaggctagattgcagtggtgcaatcttggcctactgcaacctctgcttcccttgttttcctgcctcagcctcctgaatagctggggctacaagcacacgccacaacacttggctaatttttgtatttttagtagagatggggtttcaccatttttggccaggctagtctcaaactcctgacctcaggtgatccaatcatgctgacccctaaagtgctgggattacaggcacgagccaccacacctggaccttaaatggaaatttgtaaagcaatacaaatatattagaatatcaacttaggctgttaatatgaaatttactaagaaggtagattttctaaaaaaatgtaatagtaacagaaattttggaacttataaattcattgaaggggttacaaaaacattccaaagaccaagcagaaggaagactctcgaaatatgaagacacatcttttgaagtaatccaatcaaacaaaaataaagacaaatgaacaaagcccttaagatgagtgtgcaaaaataacaatacttacaatttgttggtattactgaggtagaaagaaagataaaaaataagtttagaaatcctatttaagaaaattatttatggaagcatctcaagtgtagcaagagatttagacatccagatacagtagtcccagcaatccaagacaaatacattgcaaaaggcatattaaatcagtatatctaaagtcaacataaaagaaatacttctatgatcagcaagaaaaatgcatctagtcacctatgaaagaaaccccatcagastaagaatgagcttcttagcagaaacttcgcaggtcagaagaaaatggaatgggatttacaaattgctgaaagaaaaaaatacaataaaaatgtttatatccagcatgattaagcttcataaatgaaggagaaataaagtcttttccagacaagcaattgctgagggaatttatcaccactagagcagacttaaaacaaatgctcaaaaatgtccttgacatggaaataaaaggtatatgttcatgattatgataactcattaacatataaaactcaatgatattataaaacaatcacataaagaaggaagaaaagtcaagttgttaacacaacaaaatttcaccaaaccataaagacaaacagagaaaaagaaacaatgtataaaacaactgaaaagatttagtgacctgacagaaaataaacctcatgtataaatgttaaccttgaactcaaatggattaagtactcttctaaagagagatagattggcagaaaatataagaaacatgatccatctaaatgctgcttccaagaaattcaccttctctgtaaatacatacatagactgagagaaaagggttgaaaaaagatattttatggaaatagaaactaaaagagagtaggaatagctttacctatactagatatagcagatattaaattaaaaagttaaaaaagacaaataaggtcattgtataatgataaaaggatcaatgcaacaggaggatataacattactcagtatatatacactcaatactggagcaaccagattcataaaacaaatattactacatctaaagagagaggtggaaaataatacaataatagtgtgagacttcaactgcgcactcacagcattagacatcattaagacgggaaatcaacaaagaaatattgaacttatttggactttaggtgcaatagacctaacacactttgacagaaaagtctactcaacaactgtgaaatgtacatttttttcacataagcacatggaacattctccaagatagaccatgtatgaccttgtatagaccttgtattttaggccacaaaacaagtctcaatgaattttttaacattaaaaacatatcaagaatcttctcagaccacgcttgaataaaactgaatatcactacttttgggaactttggaaactatacaaatacatggaaatcaaacatgttccttaatgattattgtgtcaatgaagaaattaaggtggaaattatagcaatttttgaaacaaatgaaaaggaaaacacaacacatcaaattctgtgggataaagaaaaaggagttcccaaagggatgttcatagtattaaatgcctatactaaaaaagtaggaacattacaaattaacaacctaatgatggactgccatgaactagaaacacaagaacaaactaaaccgaaagtggcagaagaaaatgagttaaaaaaaaaaattctagtagaactaagtaaaatagagaccaaaaaggaaaggtagaagtacaaagggtcactgaaacaggaagtgttggttcttaaaaaaggtaaacaaaataatccactatccagattaatcatgaaaaaaagagagattacaacaaaatcagaaatgaaaaaagagagattacaacaaaatcggaaaagcaaaagaagaaattataaatcacatcacagaaatacaaayattcttaaaaattattattaagaactctacttccacaaacaagaaaacctagaggaaataaattaatttctggaaacatgcaacctcccgtttgaatcaggaggtaatagagaacttgagcagacctataatgaatagcaacattgaatcagtaataaataatttgtaacaaaggaatctcagaactaaatggattttccatacacacaaagaagaataaacagttcttttgaaattgctccaaaagttcaaagaggagagaattcttcataactcattccatgacaccactatcaccctgataccaaaaccatacaagaacacaacaaccacagaaaaactacagatcagtagtctgaagagcatagatgcaaaactcctcagcaaaatactagaaaaccaaattcaacatcataacaaaaagataatacgccataaacaagtgggttttatattaggaatataaggatggtttaacatatacaaatcaataaaagtgatatattacataaacaaaaataacaaaaccatataattatctcaagagatgcaggaaaaagcatttaataaaatttagaatctttttatgataaacagtctcaacaatctaggcataaaatgaacatatctcaatgtaataaaggccacatacaacaaacccaaatctaatatcacactgaatggagaaaagttgaaagcatttcctctaagaactagaacaagacaaggatgcccactttcaccactcctattcaacacagtactgaaagtcctagccagagcaatctggcaaaagaaagaaataaaagatatccaaactggaaaagaggaagtgaaattttttcctgttatctgactatataatcttatatcttgaaaaacctaaagactccaaaaagaatcccctagaattgataaaagaattcagtaaagtttcaggatacaaaatacatgtataaaaacaagtagcatttttttacaccaataaaagtgtagctgagaataaaatcaacaatgcaattccatttataatagttacaaaaaataaagtagaactccttgttaattaataagatgaaatatatataatgtatatattacatataaatatataacatatttatatattatatattatatatattatttatatttatatttatattgaaatataattatatattatatattaaatatgttataatcagatttatatttttaaattatataatatataaatataattatatgtacttttactgatatatatctgtatacatatatacatacgtatatgtatacacatatatacatacgtacatgtatacacatatatacatasgtacatgtatacacatatatacatacgtatatgtatacacatatgtacatatatacatacgtatatgtatacacatatgtacatatatacatatgtatatatatacacatatatacgtatatatgtatatacatacatacacgtgtatatatgtattgtccaatgtattgaattgtgtatatgtatacacgtgtatatatatttgtgtatatatatatacacacatatacacagtagtttgtagttttactgatatctatatctatatcactatatatatatcagtatatatatcagtatatatagatataagtatatagatatagatatagatatcagtaaaactacagactactgatgtaagaaaaagtagatgacacaaataaatggagaaacatcccatgctattggattggaagaattaatatatacaaaattatatatatatatatcagtaaaactacaaaatgctgatgaaagaaaaagtagatgacacaaataaatggagaaacatcccatgctattggattggaaaaatataaacaaaattaccatactgctctaagcaatctacagatttaatacttttcctatcataacatcagtgtcattttttcgaagaattagaaaacattctttttttatttttatttttatttctattattgttatactttaagttttagggtacatgtgcacaatgtgcaggtttgttacatatgtatacatgtgccatgttggtgtgctgcacccattaatttgttatttaacattaggtgtatctcctaatgctatccctcccccctccccccaccccacaacagtccccagagtgtgatgttccccttcctgtgtccatgtgttctcattgttcaattcccacctataagtgagaacatgcggtgtttggttttttgtccttgcgatagtttgctgagaatgatggtttccagtttcatccatgtccctacaaaggacatgaactcatcattttttatggctgcatagtattccatggtgtataggtgccacattttcttaatccagtctatcgttgttggacatttgggttggttccaagtcttcgctattgcagatagtgacacaataaacatacgtgtgcatgtgtctttatagtagcatgatttataatcctttgggtatatacccagtaatgggatggctgggtcaaatggtatttctagttctagatccctgaggaatcaccacactgacttccacaatggttsaactagtttacggtcccaccaacagtgtaaaagtgttcctatttctccacatcctctccarcacctgttgtttcctgactttttaatgatcgccattctaagtggtgtgagatggtatctcattgtggttttgatttgcatttctctgatggccagtgatgatgagcattttttcatgtgttttttgactgcataaatgtcttcttttgagaagtgtctgttcatatccttcgcccactttttgatggggttgtttgtttttttcttgtaaatttgttggagtccattgtagattctggatattagccctttgtcagatgagtaggttgcaaatttttctcccattttgtaggttgcctgttcactctgatggtagtttcttttgctgtgcagaagctctttagtttaattagatgccatttgtcatttttggcttttgttgcctttgcttttggtgttttagacatgaagtccttgcacatgcctatgtcctgaatggtattgcctaggttttcttctagggtttttatggttttaggtctaacgtttaagtctttaatccatcttgaactaatttttgcataaggtgtaaggaagggatccagttttagctttctacatatggctagccacttttcccagcaccatttattaaatagggaatcctttccccatttcttgtttttgtcaggtttgtcaaagatcagatggttgtagatatgtggcattatttctgagggttctgttctcttccattgatctatatctctgttttggtaccagtaccatgctgttttggttactgtagccttgtagtatagtttgaagtcaggcagcgtgatgcctccagctttgttcttttggcttaggattgacttggtgatgcgggctcttttttggttacatatgaacttagagtagttttttccagttctgtgaagaaagtcattggtagcttaatggggatggcattgaatctataaattaccttgggcagtatgaccattttcaaaatattgattcttcctatccatgagcatggaatcttcttctatttgtttgtgtcctcttttatttcgttgagaggtggtttgtagttctcctagaagaggtccttcacatcccctgtaggctggattcctagatattttattctctttgaaacaattgtaaatgggaattcactcacgatttggctctctgattgtctgtttttggtgtataggaatgcttgtgatttttgcgcattgattttgtatcctgagactttgctgaagttgcttatcagcttaaggagattttgggctgataggatggagttttctatatatacagtcatgtcatctgcaaacagggacaatttgacttcctcttttactaattgaatattctttatttctttcccttgtctgatttccctaaagagaacttccaacactatgttgaataagagtggtgagagagggcatccctgtcttgtgccagttttcaaagggaatgcttccagtttttgcccattcaatatgacattggctttgggtttggcataaatagttcttattattttgagacacgtgccatcaatacctactttatggagggtttttagcatgaagggctgttgaattttgtcaatggccttttctgcatctattgagataatcatgtgttttttgtctttggttctgtttatatgatgaattacgtttattgatttgcatatgttgaagcagtgttgcatccgagggatgaagcccacttgatcctggtggataagctttttgatgtgctcctggattcagtttgccagtattttattgaggatttttgcatcagcattcattagagatactggtctaaaattctctttttttgttgttgtgtttctgccaggctttggtatcaggatgatgttggcctcagaaaatgagttagggaggattccctctttttctattgattggaatagtttcagagggaatggtactagctcctctttgtacctctggtagaattcggctatgaatctgtctggttctggattttttttgttggtaggctaattattgcatcaatttcagaacctgttattggtgtattcagtgattcaaattcttcctagtttagtcttgggagggtgtgtgtgtccaggaatttatccgtttcttctagattttctagtttttttgtgtagaagtgtttatactattctctgatggtagtttgtatttctttgggattggtggtgctataccctttatcattttttattgcatctatttgattcctctctcttttcttctttattagtcttgctagtggtctatcaattttgttgatcttttcaaaaaaaccagctcctggattcactgattttttgaagcgttttttttttgtgtgtgtctatctccttcagttctgctctgatctgaattatttcttgcattctgttagcttttgaatgtgttggctcttgcttctctagttcttttaattgtgatattagggtgtcaatttgagatctttcttgctttctcttgtgggcgtttagtgctataaatttccctctacacactgctttaaatgtgtcccagagattctggtgtgttgtgtctttgttctcattggttttgaagaacatctttatttctgccttcatttcgttatgtacccagtagtcattcacgagcaggttgttcagtttccatatggtagagctgttttgagtgagttacttaatcctgagttctagttcgattgcactgtggtctgagagacagtttgttataatttctgttcttctacatttgctgaagagtactttacttccaactatgtggtcaattttggaataagtgtgatgtggtgctgagaataatgtatattctgttgatttggggtggagagttctgtagatgtctattaggtccgcttggtgcagagctgagttcaattcctggatatccttgttaactttctgtctcactgatctgtctaatgttgagagtggggtgttaaagtctcccattattattgtgtgggagtctaagtctctttgtaggcctctaatgacttgctttatgaatctgggtgctcctgtattgggtgcatatatatttaggatagttagctcttcttgttgaattgatccctttaccattatggagtggccttctttgtctcttttgatctttgttggtttaaagtctgttttatcagagactaggattgcaacctctgcttttttttgttttccatttgcttggtagatcttcctccatccctttattttgagccaatgtgtgtctctgcatgtgatatgggtttcctgcatacagcacactgatgtgtcttgactctctgtccaatttgccagtctgtgtcttttaattggagcatttagcccatttacatttaaggttagtattgttatgtgtcaatttgattctgtcattatgatgttaactggttattttgctcattagttgatgcagtttctttttagcattgacagtttttacaatttggcatgtttttgcagtggctgttactggttgttcctttccatgtttagtgcttccttcaggagctcttgtaaggcaggcctggtggtgacaaaatctctcggcatttgcttgtctgtaaaggatttcatttctccttcacttatgaagcttagtttggctggatatgaaattctggtttgaaaattcttttctttaagaatgttgaatattggcccccactctcttctggtttgtagagtttctgccgagagatccactgttagtctgatgggcttccctttgtgggtaacccgacctttctctctgtctgcccttgacattgttttcctttatttcaattttggtgaatctcataattatgtctcttagaattgctcttctcgaggaatatctttgcagcattctctgtagttcctgaatttgaatgttggcctgcctcgctaggttcttgaagttctcctggataatatcctgaagagtgttttccaacttgattccattctcaccgtcactttcaggtacaccaatcagatgtagatttggtcttttcacatagtcccatatttcttggaggctttgttcattttttactcgtttttctctaaacttctgttcttgcttcatttcattcatttcaacttcaatcactgttaccctttcttccactttatcaaatcggctactgaaggttgtgcattcatcacgtagttctcgtgccatggttttcagctccatgaggtcatttagggacttatctacacctgttattctagtttaccattcgtctgatcttttttcaaggtttttaacttctttgtgacgcgttcgaagatcctcctttagcttggagaagtttgttattgattgtcggacgccttcttctctcaactcatcaaagtcattctctatccagctttgttctgttgctggtgaggagctgcattcctttggaggagaagaggtgctctgatttttagaattttcagcttttctgctctggtttctccccatctttgtggttttatctacctttggtctttgatgatggtgacgtacagatggggtttaggtgtggatgtcctttctgtttgttagttttccttctaacagtcaggaccctcagttgcaggtctgttggagtttactaaggtccacttcacactctgtttgcctgggtatcaccagcagaggctgcagaacagcaaatattgcagaatggctgatgttgctgcctgatccttcctctggaagcttcatctcaggggcatccagctctgtaagatgtcagtcagcccctactgggagctgtctcccagttaggctacytgggggtcagggacccacttgaggaggcagtctgtccgttctcagatctcaaactscatgctgggagaaccagtactctcttcaaagctgtcagacaggacgtttaattctgcagaaatttctgctgccttttgttcagctctgccctgccccagaggtggagtctacagaggcaggcaggcttccttgagctgtggtgggctctatccagttttagcttaccagccgttttgtttacctagtcaagcctcagcaatggcggatgcccctcccccagcctcgctgccaccttgcagtttgatctcagactgctgtgctagcagtgagtgaggctctgtgggcttcggaccctctgagccaggcacaggatatgatttcctggtgtgccgtttgctaacgccattggaaaagcacagtattagggtgggtgtttcctgattttccaggtaccgtatgtcatggcttcccttggctaggaaagggaattctccgaccccttgtgcttcccaggtgagaggatgccccaccctgctctgtgggctgcaccctctgtctgacaagccagtgagataaacctggtacctcggttggaaatgcaaaaatcacccatcttctgtgtcgctcatgcttggagctgcagactggagctgttcctattcagccatcttgtaacctcgagcctacaacctgtcttccagcttactaattacttattctatttgtttaataatgcatttgagagattctcatgcattttcagtttgtcaagtgaatttttcttctttttaaattttaatctttaaaaaatgtctctgacggaatttggaattccttctctgcattgtctttaagttcattaggcttcctcaagacacctattttcaattctctgcctgacaattcacatatctctgtcactcctgaattggtcactggtgccttatttagtttatttggttaggttatgttttcctggatgtttttgatgcttatgtacatttattaatgtcttaacattgaagagttaggtgttgttttcaatattcaccgtctgtgcttggtttggcccatccttattgaaagacttcccgtgtattcgaagaggattgagtgttgtcctgtaagtgtgttttcactgaatccataacagcagtaggtggcgtcttaagctgaggaatgctgtgactcttgccaaatcccagaggcactgctttggtggtgttgagtaatataagggaaaatttcctgggtcaccaggtaaagtaagtcactctcttgtctctctttccctcaatatgaaggagtctgtttttatgctgagttgtctagaattgggaaagggatgacatgagtactcctgtggccactacagctggcagtgtgctagattaaacattaagctagcacagtacggggtctcatccaaggctcatggcaactactgcctgactaatgtttataggagactctggtgctcttgagtcagaagtttgggaatcctcctggtactgggttcttcacttcaggacagtcaattcccttctcactagagtgggtctagaaagaccatccaggagctaaggcctgttattggggacttcaggaatctccttgttgcttcattttactatagctacgctggtacccaacttgcaagacaaaatcttctgtacttttcccactcctttcccaaagccacagaagtctcttcaccagctacattgccggagttaaaggaagggtgatgcatgcactcttttggccaccacagctgatgttgtactaggttgggtgcatccaaaatcaattgcctctgagagaacagtgcagctccagggtttttccaaggcctgtagtccttgaggyctgatggccactcaaatttacttcaggcctcgggccatgttagtcagctagtggtggagccagccaggactggagttcctcccactggagctgagaatttccctcattcagaactgctctaaatgttccctgctttggtgctagcataatttttccctatgttgcataccactgggacagggcaggactgggttgcaatgcaaagtagcccattcactttactcaccatcctgtaagcaaacaaattgtctttcaatgaggtgctgatggacaatgagggagggtttgtgtaggcaatgcaagaccatctttcctactctcttcagtgcctcttttattgatattttgttaaaaccagttattgtgattgctcattttattggttcttatgaatgtgttttcttgcatgcatagttgtttaatttggtgttcttgcaaggaggctgactgctgaagcattctattcagccatcctgctctgcctacacttccctataacaggtttgttgaggtataattcatataccatgcaatgtgcctatttaatgtatacaatgtaatggattttagtacatttagagttgtgcaacaatcatcacaattttagaatattttcgtcattcctaaaagagacctcgtactcattatcagtcactctacaacccactcgcacctccatagccttaagtaaccaagaatctactttctgtctctatagatttgattattctggatatttcatgtgaataggctcatacgtatgtgatgtcttgttactggcttctttcactaggcacaatatttcaagttttatctatattgtatcatatatcagcacttactttgtgtgactgagtaatattttatcaataaattttatttatgtattcatcaattgactggtattttactgttatgaatgattattcatatataagtcttgtataggtgttttggtctttactattttgagaaaatactcttgtattttatttctttccttcaatctcaggaacctgtgaaatttgtagatttgcttggtgaccatgggaaacatgtcagtcctctgtgggagttgatcaaatggtgcctgggtctgtcagtgtacaccatcccttccattggtatgtaaatcatattctacctagaccagtttgwtgtcctgtaatatttcttaatatctaaatataaattttggactaaaggccccatgcaagtccaaaatccagtggggtactgaaatcttaacgctccaaaatgatctcctttgactccatgtctcacatccaggtcacgctgatgcaagaggtgggttctcatggtcttgggcagctccacccctatggctttccagggtatagcctccctccaagttgctttcatgtgttggcattgagtgtctgtggattttctgggtgtactgtgcaagctatcagtggatctaccattctggggtctggaggacagtggccctcttctcacagctccactaggcagtgctccagtggggactctgtgtgggagcttcaaccccacatttcccttccacactgccctagcagaggttttctgtgagggccttgtccctcagcacacctctgtctgggcagtcaggcattttcatacatcctctaaaatctgggcagaggtttccaaacatcaattcttgatttttgttcacccacaggcccaacaccacatggaagccaccaaggtttggggcttccatcctctgaagcaattacctgagctcaatcttggccccttttagccatgattctagccatggctagaggggctggaatgcagggcaccaagtccctgggctgcacacagcaagagggccctgggcctggtccatgaaaccattttttcctcttaggcctctgaacctgtgatggaagggctgccacaaaggactctgaaatgccctggagacattttctccattgtcttggagattaacatttggatcctccttatttatgtaaatttctgcagccggcttgaatttctccttagaaaatgggtttttcttttctatccatcatcaggctgcaaattttccaaacgtttattctctgtttccccttttctgaaggacttgctttgatgtccaggctggagtgcagtgatgcaatcatgactcactgcagcattgacctcctgggctaaagcaatcctcctgcctcaactcctaagttgctgggactacagggctcaccaccacacctggctaagagatggagtttcatcatattgcccaagctggtcttgaacccctgggctcaagtaatctgccagccttggccttgagaagtgctgggattacagacatgagccaccatgctcagctataatgggttttcaattatgtgaaaaatccttatgatgaactatgcagtagcagaggctagaaatgttatatatagcattactaaaacaaactagaaggagttaaaagtaagattataaagtttccttttccatcacttactttctcagtgttctataatgaacatgtattacttgaataagaaaagataaagaacactaggaattaaaatgaagtttattaccttaacttgatatatgwtatcattctgtaggactggctttgttggaagaaaagctcagatatagcaatgagaaataccaaaagtttaaggcagtggaagaaagcctgcgtaaagagctggtggatatgctaggtgatgatggtgtgttcttatatccctcacatcccacagtggcacctaagcatcatgtccctctaacacggccyttcaactttgcttacacaggtacctaattgtattccttacattctgtaatcttaaagaaatagagatgtatgtttccaaggaaagcataattttcttttgcagttggacaagttttaaacmtgcaggtataaaagtgctgtgtgattgaaaactccagaaaacagttgctaatgtcatatgttgaagatactttgccaatatctggtttctccacaataatcctacaagtgcatatgagtatccacattttacagaactgtgcctcagggaggttcagccacttgtcttctatcactcagtgtgatcacactagatccaaagtctcccctggctgctctgaattaaaccaagttaagcttttatcaggatctgtggcttcccagaagattcttgtacagaagacaattctccaagggatcatttacttgacttagctatcatcccctttgaattcaattcattctattcaccaaactaattttcttcacctggtttttaagccatggatggatcatgattatgtgaagtctaaaggcccctggacatgtactaggtcagtttctatggtttctccagagtcttgtcccagggaaccacactattctttgagatgaagatagagaactcttcatcaaatacacgttctcacccaataaacctgtggtccacttaaagttagaatttggaatcctttgctctgcaattttctacttgtgcatctggaggaagacattgaatctttctcaacttatttcctatctaggaagtcagggtaatctatgccttgcagtgttgcagttaagattaaatgaaataatacgtgtaaattaattaacataagggttgtggaggatgagggagaggatattaaacagtccctatccttaatttccttacccttactctctccctggctttgatcactcactcttaatttcttccttcctgtccttccttccttccttccttgcttccttccttccttcttggagttttgctcttgttgcccaggctggaatgcaatggcacaagctcggctcactgcaacctccacctcctaggttcaagcgattctcctacctcagacccccaagtagctgggattacaggagtgtgccaccacacccagctaagttttgtatttttagtagagacaggtttcaccatgttggccaggctggtcttgaactcctgacctcagattatctgtccgccttggcctcccagagtgctgggattgcatacatgagccaccatgcctggccttaatttcttaagtctttgaaaaaacatgctgcctaaattgctgcgtttaagtttctatcacctagttactcagtttctgaagacaggtaaaatactttagtcaataggctagaacccaaggagaaatatactgtttataccttttggggaggattttcctcagcttgaggcttcctatggtttgtaacttttccctctagtttagccttgaacacatttaaagagtgttccttgtaagccagatgatattctaggtaatatggatacaagacccatgatagatgatagctgcaatttagcaagtatctaatatatacgagatactagaagccagaaattctatacattatctcatttatgtttcccccaaatccctcacagcaactgaagttatctttgtgtaaaacctgaggaaactgaatgatgtataaagtgatttaagggtcagggtcaggactgaaattcagttgtattctatctgactttaaatgcaatgttattttcactacatgtatgggttaataatgctcattcatgttttgtttttattgtctttactaaagctgaaaatataagaggtttgtgagaccttttgtcaaagatgtagaattgttggatgccaaataggttaatgttttattcctggttcttttttttcctactgagaaatacccctctcagtttctcaagcttgtataagctttttatgtttgtctcctacttacaagatgggtacactaaatcagatatttaatttttgagccttggctttcttacagctaagatgaggatgctagattgactttgaaggatggttggaaggatataatrtaataatgtgtagagtgctttaaaattattaataatagtgataatgataccatttattggagacatgtatatgtttatattgatattaatgtaggtaatatcaatatctctgctttacttcgtagtattagttayatgtgttttccttgttttatctattcctagaattgttctgagttttacatgtttcatctcattttatcttacagcagccctataaaaaggagaaattattagtgtcctcattttacagatgaaggaatttagacacaaaaatctttaggaaacatttccaaagtcacatagctaagataatatacgaactgggactttaacccaggccctatgatttcagaggaagtgatcttatttattacacagaagaggaaacaggaggctgaacagggtctctcagctatgaagtgaagtgataaggattcaaacccaggtctgtctgactccaaatcctattgcttctaattaactctcttcccttgttcttctgcctcacttagtgctcagtgaagcaaagtaccttctcctactttgctccattgacactctacaatgagaataaatttattaagcatgtattgtgaactatactgtatgcactggtgttagatgaatcagatacattccatgctctcagggagctcctagcttagtacaagagacaaacaaatgttaacagagaatttcagtagaagaaaacaaaggaaggctttctggaataggtgacccctgatctgggtcctgaaggagaactagaaattaatcagaggaaggatgttgagtaagtattacaatggtccacgcagtacgaaccccatgagcaatagaacagaaaaacacacaggaacactgtggacagagggtataaacactacactaactggagagagtaagtttttaatagaggagtgagaggaggagcatgagtttgaaaaggtaagcatgtcatggagaacattcacagccatgctaaaaactgcaaaaaaaatttatttgtcttggcaccctgccccatcctgctttctttgcataatgtcactggaataacacagtaatgaaagagaataatctagcctgcagattctttgaatatttgattagcctatgctatttcctgataacatgcaatcaacaatgtttcatatcattgtatctcaaagaagttatttacagttttcttccactttagtcctaccacgattatcaacataacacctatatgtcataataattgggagaggtgattaccaggacagatggaaggaaacagcttacaaaagtggcctttcactggctttctcccctctccccactttaggtgtctgtactcaaagatytcttggaccatttatatcctgagatgaacagcattggccatacagcattttaaagatctcatctgagaaacccattgatattggtgccaggaatgctaagcagatcttttgtgacctcttcagcatccagcattagagtgaaactcaagatttatatgtcaggtttggcaaaatcataacatgccactctcaagagtccctcttgtacccatgccagtcattaacaattgatcacagcattctttttctctgagaacaaacttgactttgtgatatttaaacagagtgggcttggtcacctccccaattgataagctagacacacaaaatgaaatgttcatgtagtctaagcaaagattctacttaacaaaataatctgctatattgttagctcttcaaaggctgtggtctgtttctatcttgttcacctatgtaatccgcattgactaggacattgcattgttgcacaaaatgcataattattttttgttaaactaacaaatacataattaaaaatataaataagaatgaacatcccagaataacagagtaagaagctcagcaaattctctctcaagcaaaccagcaataaaactggaaaaattactggaaacaaccatttcaagtgtgaaaaatgatcaaatggcataaagcaaattcaggagcatttattcaagaaaaattagtgattcctaataagaaaagttggagtctatgatatttaagctgggatctgttttcccctccgcttctcagatacagctttgaggtacaaaactttcacactgggtagggcaaggcagaccttaaagactgacaactcccattctttccagacccatgttacacagcatctgttgtgggcaagtagagaatactgctacatccaacagcttccattacctgtggcaccttattgtggaagttctaaacaaggtcatggctggtcataagaacttgcagctcttcaaccctgcccaagagaggctgattttacatgaagcagaatatggaagatcttagatacaaaaaattccctgaaagctaaaatttcagtgatactaacaaaattcacagcaacgtaccccagaggtagagaaaaatcagaatcaagagttgataaaatatattaactaaagcatctagttttcaacaaaaatttatgaggcatacaagtaaaaaaggaaaatgagacccacaaacaacaatgcccacctctgccacttgtagccagcaggccatgcctgctagagcttccagcccagcagttcctcttctttctgaactctgccagtggacacagcctcctgttatccagggaaacagaaaaactgcaggataggtgattccacaacccccaccascactcatagccaggcagctagaacttccagcccagcagtcccacttctgtctgaactctgatggcaggaacagcctctagaatataacccaacagcaggtcaggcaactgcacccaaacccgccactcatagccaggaaatccatgtctgatagagcttccagcccagcattcccacatctgcctgaactctgtgtgtggccacaacttcttgaacccccggaaagcacctagacaggggattaagtgaccccaccccatcccacagctcttagatgatcaggacttggtggtggccaagcaagggtgagccctcgttctcagatcactgagagaagtggagatacccaggttcatgggctggcagaggattggggtgtgccttgttccacagggccagcctggcaaggatatgacctgtctactaaatgtggtccctgcctgagggagcccatggaccagaacacctaacaaaagaagtgagggcatggaaccagtgatcgaagggggctcctccaargcccaggagccatctaggtgagcgagtcacctctctcccccacaccacagaggactactgtcatcttggccagaacaccgaagagccctgaaagagagtaggaagagcctatctgcctgctagcactcttaagcgccacctgctggatctcaggtcaaaatgcaaacctaaaatattttgcaagtatgtatcacctgtgaaaactaaggaaaagatccagccagaaataaacattctgtacaaagtcatgaccctttgaaatatacccagaaacaaagccagctgactatcctcaacttatctcacgggtgaagaaacatcaacccttacacatgagaaagaatgaatccaagaactggcaactcaaaaagccagtgtttgcccttacctataaacgtacacattagcctcccagaaatggttcttaaccagagtgagctgactgtggacatagaattcagaagytggatgacaaggaagctcagtgagaatgaggagaaagttgaaacataatccaaggaatccaataaaacaattcagtagctgaaagataaaatatccattttaagaaagaaccaaattaaatttttggaactgaaaaatttacttccagatctccacaatagaatctgaagcatcagcagcagaaaaattaagatgaagaaagaatctctgagctggaagaccagcttatacaatcaactcagtcagacaaaaataaagaaaaaagaatttttgaaaatgaaaaaatcctttgagaaatatgggattatgtaaagataccaaatgtatgactcatggtgttttcaaaagaaaaggagagagagtaacttgtaaaacatatttgaggatatagtccatgaaaatttccccaaacgtcccagggaggaggacatacaaattcaataaatacacaaaccccctgtagatactacacaagatgacaaaccggaaggtacatagtcatcagattcaccaagatcaactcaaaagaaaaactcttaaaagtagytaaagagaaaaatcaggttacctacaaagtaaaccccaccagactctctgtaagaactctctgtaagaaacctacaagtgagaagagattgggggcctattttcaatattgttacagtgaagaattttcaaccaagaatatcatattccatgaaactaarcttcataagcaaacgagaaataaaattcttcccagacaagcaagtactaaaggaatttattattaccagaccacccttacccgagttctttaagagagtgctaaatatgaaaataaaggaccaaaacttgctacctcaaaaatccactcaagcacatggcccataaacaatataaagcagctatgcagtcaagtctaaaaaacagtcaacaacatgatgacaggatcaaaatctcataaattaatactaaccctgaatgtaaagggtctaaaagtaccacttaaaatgcatagagtggcaagctagataaaaagataaaacccaacaatctactgtcttcaagagacccatttcaactgcaatgacacccacaagttcaaagtaaaaggatggagaaagatctatcaagcaaatagaaaacaacaacaacaaaagatcaggagtcattattcttacattagattaacaaattttaaaccagcaacggtcataaaagacaaagaagggtaatacttaataataaagagttcaattcaacaggaagtcttaactatcctaaacatatacacacccaatgtagaagtacctggattcataaaggaagttcttcctaaccaatggaaagatttagacagccacaaataataacgggggattttaacatcccactcactgagttagacagatcactgaggcagaaaactaacaaagaaattctggattgaaacttgacatttgatcaattggacccaatcaacctctacagagtactccacacaacaaccacagaatatatatttttctcatccatacacagaacatattctaaggtccaccacatccttggacataaagcaaatcacaataaattcaaagaaatcaaaaccataccaagcaaactctcagaccatagtgcaataaaagcagaaatcaataccaagatctctcaaaactaccagaaaatggaaattaaacaactttctcctgaataactcttgggcaaaaaacaaaattaagacagtaattaaaaattactttgaaattaatgaaataggagacacagcttaccaaatctttgagatgcagttaaagcagtggtaagagacaaatttgtagtgctaaacaccttcatcaagaggttagaaagatgtcaaattaacaacctaaagacagtcagataaacaagaaaaaagaacatccaactccgaataaagtagaagaaaataaacaactaaatcagagaactgagctgaattcagacctaaaagaccatacaaaacatcaatgaaaacaagtgttgctccttcaaaagaataaacaagattgatataccattagctaaactaacaaggaataataaaaaataaagatccaaatgagcacaatgagaaatgacaaagatgatattacaactgattccacagaaatagaatagttccttagagactatacagaacacctttgtgaacacaagttagaaaatatagatacaatggataaattcctagaaacacacaacctyccaagatagaatcagggataaaagtgaagacatgaacagataaataacaagttcagaaattgaatcactaataaaaaaacttaccaacaaaaaagagcccaggaccatggattcacggccaaattctaccagacatataaggaaaaactgataccaatcctactcacactttcccaagaaaatcgaagaagagtcttctccctaatgcattctatgaatccagcagcattctgatacaaaaatctggcagagacaaaatgtaaagtaaaataaaaaaaaattcaagtcaatatccctgatgaacatggatgcaaaaattctcaacaagataatagcaaactaaatccaccagcatatcaaaaagttaatccaacacagtcatgcaagttttatttctgggatgcaaggttgattcaccatacagaaatcaataaatgtgattcaccaaataaacagaatcaaaagcaaaaactacatgatcatctcaatagatacacaaaaagcctataatataatccaacatcccttaatgacaaaagccctcaacagattaagcattaaagtagcatacctaaaaatagtaaaagccatctacgacaaacccacagccaacgtaatactgaatgagcaaaaactggaacggttccccttgggaactggaacaagacaagtatgcccactttcaccrctcctattcaatatagtactggatgtgctagccagcgcaatgaagaaagggaataaataaaaggcacccaaataaaaagagagaaaatcaaactctctctctttactgatatgattcaatacctagaaaaccctaaagactctgctaagtctcctggaactgataaatgaattcactaaaattttaatatactaaaccaatgtacaaaaatcctaacatttttatacaccaatattgttytaggtgagaatcaaatgaagaacagaattccatttacaatagccacaaaaaaaaaaaaaaggaatacctaggaacccatctaaccaatgaggtaaagatctttacaagcagaactgcaaaacacagctaaaagaaatcagaggtaacacaaataaatgggaaaatatttcatgctcatatattggaagaatccacatagttaaaatggccatactgcccaaagcaatttacagattcaacactactcctatcaaaatattaatgccatttttacaaaatttgacaaaattatttttaaattcatttggaacaaaaaaagaacctcaacagctaaagcaatattaatcaaaaagagccaatacagaagcatcacattgcccaacttccaaatgtactataaggctacaataatcaaaacagcatggtactgctgcaaaaaaagacacatagaccaaggaaacagaattgagaacccagaaataaacctgccacctacaaccatctgatcttcaacaaaatgagcaaaagtaagcaatggaggaaaggactctctattcaataaatggyactrtaatagtttgcctgccgtatgcagaagaatgaaactggatctctacctgtcaccatatatgaaaactaagttaaagtagattaaatatttaaatgtaagacctcaaactataaaaatattgacagatagctgggcaggtgccctgtaatcccagctactcaggaggctgaggcaggagaatcgcttgaacccaggaggcagaggttgcagtgaatcgagatggcaccactgcactccaacctgggtgacagagcaagactccatccaaaaaaaamcaaaaaaatcctagaagaaaacctaggaagatggatgtcgagatggctgaataggaatagcagcttcagtctgcagttcccagtgagatcaacgcagaaggggagtgacttctgcatttgcaattgaggtaacctaatcatctcgctgggactggttaggcagtgggtgcagaccatggagggygagcagaagcagtgttgggcattgccttacccgggaagtgcaaggagtgggggyctccgttccctagccaagggaagccctgagagactgggctatccagcccatttactatgctttccccacaggtttgcaatccaaagaacaggagattccctcttgtgcctacaccaccagggacctgggtttgaaacacaaaactgggaggctgtttgggcagtcactgtgctagctgcaagagttgttttcttgttgtttcccagtggcgcctggaactccaccaagacagaaccrttcactcccctggaaagagggaaagggggctgaagccagagagccaagtggtctcgctcagtggttcccactcccatggagacaagcaagctaagaaccactggcttgaaattctcacagccagcacagtactctgaagtcaacctgggacgatctagcttggtggggggaggggcatccgccattactgaggcttgactaggcagttttcccctgagagtgctaacaaggcctgaaagtacaggctgaagggaaatcaacacagcatggcaaaagcagctatggccagactgcctctctagattcctcctcactgggcagggcatctctgaaagaaaggcagcagccccaggcaggggcttatagataaatctttcatctccctggggcagagcacctggggggaaagggtggctgtgggcacagcttcagtgaacttaaacatttctgcctgatggctctgaggagagcagcagatcctgacaagggggtttctcccagcacagtggtcaagctctgctaaggaagagactgcctcctcaagtgggtctctaaaccttgtgcctcgtgactgggatagacctctcaacagggtttgacagacacctcatacaggagagctctggctggcataaagccagtgcccctctgggattaagcttccagaggaagaagcaggcagcaatctttgctgttctgcagcctctgctggtgatacccagacaaataggttctggagtggacctccaacaaacttcagcagacctgcggaagaggggcctgtctgctaaaagacaaactaacaaaaagaaagcaacaacatcaacatcagcataaagaaacccttacaaaaccccatccaaaggtcaccagcctcaaagatcaaaggtagataaatccactacaatgaagaaaaaacagcacaacaatgctgaaacttccaaaaacaagaatgcctcttctcccccaagtgatcacaaatcctctccagcaagggcacaaaaatgcatgcagaatgagtttgacgaattgacagaagtaggcttcagaacgtgggtgataaaaaactcatctaagctaaagaagtgtgttctaaaccaatgcaaggaaggcgtgaagacaagattagagaaaaaagaatgaaaaggaatgaaaaaagccttcaagaaatatgggactatatgaaaagaatgaacctacgatggattggggtccctgaaagtgatgaggagaatggaaccaagttggacaacacacttcaggatattacccaggaaaacttccccaacctagcaagacacacgaacattcaaattcaggaaatactgagaataccactaaggtactcctcaagaagagcaaccccaagacaggtaatcctcagattctccaaagttgaaaggctggaataaatgttaagggcagctagagagaaaggtcaggttacctacaaagggaaacccgccagactaatagcagatgtctctgcagaaaccctacaagccagaagagagtgggggccagtattctcaaagaaaagaatttttaactcagaatttcttatccagccaaactaagcttcataagcaaatgagaaataaaatcctttccagacaagcaaatgctcagggattttgtcactaccaggcctgccttacaagagatcctgaagaaatcactaaatatggaaaggaaaaactggtactagccactgcaaaaatacaccaaaatataaagaccaatgacactatgaagaaacagcatcaactaacgtgcaaaataactagctagcatcatgatgacagaatcaatttcacacacaacaatattaaccttaaatgtaaatgggctaaatgccccaattaaaagacacaaactggtaaattggataaagagtcgagacccatcattgtgctgtattcaggggacccacctcacgtgcaaagacgcacataggctcaaaataaagggatgggggaatatttaccaaataaatggaaagcaaaggaaaacaggggtttcaatcctagtctctgataaaacagactgcaaaccaacaatgaccaaaaaagacaagaagggcattacataatggtaaaatgatcaatgtaaaaagaagagctaactatcctaaacatacatgcrcccaatacaggagcaccagattaataaaaaaaaaaaagttctcagagttctacaaaaagacttagactcccacacaataatagtgggagactttaacacccaactgtcaatattagatggatcaatgaggcagaaatgtagcaaggatattcaggacttgaactcagctctgaaccaagcaaacctaatagacatctgcagaactctctaccccaaatcagcagaatacattcttcctaacaccacgtagcacttattctaaaattgaccacatagttggaagtaaaacactcctcagcaaatgcaaaagattggaaatcataacaaagtctcacagaacacagtgcaatcaaattagaactcaggattaagaaactcactcaaaaccacacaactacatggaaactcaacaacctgctcctgaatgactactgggtaaataacaaaattaaggcagaaataaataagttctttgaaaccaatgagaaccaagacagaacataccagaatctctgggacacagctgaagcagtgttaagagggacatttatagcactaaatgccaaaatcagaaagggagaaagatctaaaatcaacaccctaacatcacaattataagaactacagaagaaagagcagacaaattcaaaggcaatcagaagacacaaaataagatcagagcagaattgaaggagataaagactcaaaaaaactttaaaaaaaatcaatgaatacaggagctggtttttcaaaaagattaacaaaatacatagaccacttgccagactaataaagaagaaaagagagaagaatcaaatagacacaataaaaaatgataaagggaatgtcaccactgatcccacagaaatacaaactaccatcagagaatactataaacacctctatgcaaataaactagaaaatctagaagaagtggataaattcctggacacatacaccctcccaaggctaaaccaggaggaagtcacatccctgaatagaccaataacaagttctgaaattaaggcagtaattaatagcctacaaaaaaaaaaaaaaaaaaaaaacccaggaccagacgcattcacatgaggattctaccagaggtacaaagagcagttggtactattccttctgaaacgattccgaagaatagaagaagagggattcctccctaactcattttatgaggccagcattgtcctgattccataacccggcagagacacaacaaaaacagaaaatttcaggccagtattcctgatgaaaatggatgcaaaatttctcaataaaatactggcaaaccgaatccacctgcacatcaaaaagcttatccatcacgatgaagtcggtttcataactgggatgcaaggcttgttcaacatacgcaaatcaataaacataacccatcacataaagagaaccagtgataaaaaacacatgattatctcaatagatgcagaaaaagccttcaataaaattaaacaccgcttcattctaaaaactctaaataaactaggtattgatggaacatatttcaaaataataagcactatttatgataaacccatagccaatatcataccaaataggtaaaatctggaagcattccctctaacaaccaacacaagacaaggatgccgtctctcaccattcctattcaacatagtattggaagttctggccaggccaatctggcaggagaaagaaataaagtctattcaaataggaagagaggaagtcaaattgtctctgtatgcagatgacatgattgtatatttagaaaaccccatcatctcagccccaaaactctttaaggtgataagcaactccagcagtttcatgatacaaaatcagtgtgcaaaaatcacaagcattcctatacaccaataatagacaagcagggagccaaatcatgattgaactcctattcacaattgctacaaagaaaatttaaaaacccaggaatacaacttacaagggacgtgaaggatctcctcaagaagaactacaaaccactgctcaaggaaataagagaggacacaaacaaatgaaaaaacattccatactgatggataggaagaatcaatatcatgaaaatggccataccacccaaagtaatttatagattcaattctattcccatcaaggtattagtgactctcttcacagaactagaaaaaactaatttaaattttatatgaaacaaaaaaagagcccatatagccaagaaaaccctaagaaaaaagaccaaagctggaggcatcatgctacctgactttaaactatattacaagactacagtaaccaaaacaccatagtattggcaccaaaacagatatatagaccaatagaacagaacagaggccttagaagtaagaacacacttctataaccatctgatcatcgacaaacctgacaaaaacaagcaatgaggaaataattacctatttaataaatggtgctgggaaaactggctaaacagacacttctcaaaaaaagacatttatctggccaacaaacatgaaaaaaagctcatcatcactggtcattagagaaatgcaaatcaaaaccacaatgagataccatctcaccccagttagaatggtgatcattaaaaagtctggaaacaacagttgctggtcaggatgtggagaaataggaatgcttttacactgatggtggaagtgtaaattatttcaaccattgtggaaggcagtatggcaatccctcaaggatctagaacaagaaataccatttgacctagcaatcacagtacagggaatatacccaaaggattacaaatcattctactataaagacagatccacacatatgtttattgcagcactatttacactagcaaaaacttggaatcaacccaaatgcccatcaatgatagattggataaagaaaatgttgcacatatacaccataaagtactatgcagccataaaaatgaattagttcatgatgtcctttgcagggacttggatgaagctggaaaccataatcctcagccaactaacacaggaacagaaaaccaaacactgcatgtttttactcaaaagcgggagttgaacaataagaagacacacacacagggatgggaacatcacataccgtggcctattatggcattgggggaaaggggagcaagagcattaggacaaatacctaatgtatgcggggcttaaaacctaaatgatgggttgataggtgcagcaaaccaccatagcaaatgtatacctatgtaacaaacctgcacattcatcacatgcatcccagaacttaaagaaaaataaaaataattttaaaaagaaagaaaacctagtaaatacttttcttgacatgggttttggcaaataatttatggccaagttcctaatagcaattgcaaaaaaaaaaaaaaaaaaaaaattgacaaatgagwcctaattaaagtaaagggcttctgtgcaataaaataaattaccaatagaatcaacaaacagtaacagaatgggaraaaatatttgcaaactatacatccaacaaaggcctactatccaraacctacaaaaaacttaacaaatcaacgtgcaaaaaaraaaccacctgaacaaccacatgttgggtactatgtttatgacctggaagataggatcactagaacctcaagccacagcatcatacaatttactcaagtaacaaatctacatgatgtataccatttaatatataataaaagttgaaattaacaaaaaaaacaatgacaacaaaaacaaaatcaggcaatagaatcattcttttatcttggacttagaagacaaataatacaatgaggatatttaaggatattcagacaactaaagaaaaccatgttctaagaatcaaaagatggaatgacagtattttattaaatagagactatcattgaagagatgaaagttatttgaaagaaaaagcaaatagaaattttgaagttgaaaattaattaaaattaaaattcactagaggagctcaacattatgttttaaatggaagaataaagaggaaagaatcagcaggcttaatgatagatcagttggcataatttaatctaatgaacagagagaaaagcaaaagaataaaaataaacagtctcagggaccattgtgatacccatcaagcatactaatatatgcatatggagaattccagaacgggagatgagtaagaaaagatgaatcaaaaaaagtttgaggacattatatctgaaaatgtgatgaagttaacaaactctaagtaggacaaatgcaaagatatccaccctaaataaatgaaaaattcaaaagtagcaaagaaaaataacctacccatcaactagaaggaaaccacaataacagtgatggatgagttatcagaaacaaggaagccagaaaacagtgagatgatatttttaaaataataaaagacagccaaccaatactcttataattcacagaatctttcaaatgttaagacaaaataaaaacctttgcagataaactaaaactgaaagagaattgtgttgctaggagatcatctttacaagaaatactacagggagtttgtcttggtgaaagaaagtgacaccagacaataattcaaagtcatatgaaaaatcaaggagctctggtgaaggtaattacaaaagacataataattacaaatttattattatttcttctcttgcttttaaaaataatacccaaaacaattattaaatggtatgttttgaattatatataaatgtaatatatatgacagcaatagcacaaaggaatggagaaggaataaagctatattgtaacaagaaaatgacactcaaccataactgaaatccaaaaatggaatgaagactactggaaatggtaagcaggttaatgcaaaagactctacaaatgtactttcctcttttttcttgtcttctttcatacacacgcacacataaaaacacatacatacattatataaagcraaagctatagcactgtattgttggattayctctctctctctctctctctctctmtatatatatatatatatatatatatacccacacacacatagtatacataactataataacacagaaaaggattagagaatgcagctattttgctgcaaactttttgtattttactgtaaattagttaatagattctgaagagttaagatggctgttttaatccataaatcagtcactaaaaatacctcaaaatatagcctaacaactcaaaactaattaaaataatatactggaaaagtatatatatgtgtatatatatcttaattaaaataatatactggaaaagtatatatatatatataacaaaagtatgtaaaagaggaacagaaaaaacgaggcatatagaaaacatgtagcaaatcaggtatataaatacaacaatttcagtaataacattaaatttgaatggaacaaacactccaatcaaacggcaaacatgccaggctggatgcaaaaaatcaaggatcaacagtatgctatatacaaaggacacaattaagattcaaatagattgaaactaaaaggatgggaaaagatatttcctatctattattttccccacttgagatattggaaagcactcagcagtctccacagagtatatacacaaggcttctattgaaaggcaaaaggtatagggcagtgacagtctaagaatgcagacaagcattaagggtgtgaaataaatacattgtaggcaaccattgtggatgtaggattgatttcataatgcaagatgcctatgagccctaatcacatacacagaccatgctgaatcttgagctttaataatcaagatttgtacaaggaatcttggcttatagaggtctcaaaaacaagctctccagaggtggttttgctgctgtkgtttttgttgctgatgatgatgatttttgttaccctcaccacataattaagatagactttccaaacaagtttcaatctattattaaataagttgatttgggttccaagatggccaaataggaacagctccagtccacagctcccagcatgagcgacgcagaagatgggtgacttctgcatttccaactgaggtaccagatgcatctcactggggagtgttggacagtgggtgcaggacagcgggtgcagtgcaatgagagtgagccaaagcagggcaaggcatcgcctctcccaggaagtgcaaggggtcagggaattccctttcctagtcaaagaaaggggtgacagaaggcaccttgaaaatcgggtcactcccaccataatactgcacttttccaatggtcttagcaaagggcacaccaggagattatatcctgcacctggctcagagggtcctacacccatggagccacactcattgctagcatagcagtctgagatcaaactgcaaggtgacagcgaggctggaggagaggtgcacaacattgctgaggcttgagtaggtaaacaaagcagccaggaatcttgaactgggtggagcccaccacagctcaaggaggcctgcctgactctgtagactccacctctgggggcagggcatagccaaacaaaaggcagcagaaacctctgcagacttaaatgtccctgtctgacagctctgaagagagtagtggttctcccagcacagtttgagatctgaaaacggacagactgcctcctcaagtgggtccctgacctccaagtagcctaactgagagacaccccccagtaggggcagactgacacctcacacagctgggtacccctctgagatgaagcttccagaggaatgatcaggcagcaacatttgctgttcagcaatattcgttgttccacagctttcgttgctgataccaaggcaaacagggtctggagtggacctccagcaaactcaaacaatcctgcagctgatggtctacgctgttagaaggaaaactaacaaaaagaaaggacatccacaccaaaaatccatctgttggtcaccataatcaagacaaaaactagataaaaccacaaagatggtgaaaaaacagggcagaaaatctgaaaattctaaaaatcagagcacctctccccctccaaaggaacgcagctcctcaacagcaatggaacaaagctggatggagaatgactttgacgagttgagagaagaaggcttcagatgatcaaacttctctgagctaaaggagcaagttcgaacccaatgcaaagaagttaaaaacgttgaaaaaagattagatgaatggctaactagaataaccagtgtagagaagtccttaaatgacctgatggagctgaaaaccatggcatgagaatgacgtgatgaatgcacaagcttcactagctgatttgatcaaacggaagaaagggtatcagtgattgaagatcaaatgaatgaaatgaagtgagaacagaagtttacagaaaaaaatagtaaaaagaaatgaagaaagcatccaagaaatatgggactatgtgaaaagaccaaatctacgtctgactggtgtacctgaaactgacggggagaatggaaccaagttggaaaacactctacaggatattatccaggagaacttccccaatctagcaaggtaggccaacattcagatccaggaaatacagagaatgctgcaaagatactcctcgagatgagcaactccaagacacataattgtcagattcaccaatgttgaaatgaaggaaaaaatattaagggcagccagagagaaaggttgggttacccacaaaagaaagcccatcagactaacagcggatctctcagcagaaactctacaaaccagaagagagtgggggccaattttcaacattcttaaagaaaagaattttcaacccagaatttcatatccagccaaactaagcttcataagtgaaggagaaattaaatcctttacagacaaacaaatgctgagagattttatcactactaggcctgacctacaagagctcctgaaggaagcactaaacatggaaaggaacaactggtaacagccactgcaaaaacatgccaaattgtaaagaccttcaaagctaggaagaaactgcatcaactaacgagcaaaataaccagctaacatcataatgaaaggatcaaattcacacataccaatattaaccttaaatgtcaatgggctaaacgctcctattaaaagacacagactgacaaattggatagagagtcaagacccatcagtgtgctgtattcaggagacccatctcacatgcagagacacacattggctcaaaataaagggatggaggaagatctaccaagcaaatggaaaacaaaaaaaggcaggggttgcaatcctgatctctgatgaaacacactttaaaccaacaaacatcaaaagagacaaagaaggccattacataataaaaaagtgatcaattcaataagaagagctaactatcctaaatacatctgcacccaatacaggagcacccagattcataaagcaagtcctgagagacctacaaagagaattacactccaacacaataataatgggagactttaacaccccactgtcaacattagacagatcagtgagacagaaagttaacaaggatatccagtaattgaactcagctctgcaccaagcggacctaatagacatccacagaagtcttcaccccaaatcaacagaatatacattcttcgcagcaccacacctcacctattccaaaattaaccacatagttggaagtaaagcactcctcagcaaatgtaaaagaacagaaattataacaaactgtctcttagatcacagtgcaatcaaactagaactcaggattaataaactcactcaaaaccactcagctacatggaaactgaagaacctcctcctgaatgactactgggtacataatgaaatgaaggcagaaataaagatgttcttcaaaaccaatgagaacaaagacacaaaacaccagaatctctgggacacatttaaagcagtgtgtagagggaaatttatagcactaaatgcccacaagagaaagcaggaaagatcgaaatttgacaccctaatatcacaattaaaagaactataggagcaagagcgaacacattcaaaagctagcagaaggagagaaataactcagatcagagaaaaactgaaggagatagagacacaaaaaacccttcaaaatatcaacgaatccaggagctggttttttgaaaagatcaacaaaattgatagactactagcaagactaataaagaagaaaagagaagaatcaaatagacacaataaaaaatgataaagcggatatcaacaccaatcccacagaaatacaaactaccatcagagaatactataagcacctctatgcaaataaactagaaaatctagaagaaatggataaatttctggacacatacaccccctaagactaaaccaggaagaacatgaatccctgaatagaccaaaaacaggctctgaaattgaggcaataattaatagcctaccaaccaaaagaagtccaggagcagatggactcgcagccaaattctaccagaggtacaaggaggagctggtaccattacttctgaaactattccaatcgatagaaaaagagcgaatcctccctaactcattttatgaggccagcatcatcctaataccaaagcctggcagagacacaaccaaaaaagaattttagaccaatatccctgatgaacattgatgcaaaaatcctcaataaaatactggcaaaccgaatccagcagcacataaaaaagcttatccaccatgatcaagtgggcttcatccctgggatgcaaggctgcttcaacacacgcaaatcaataaacgtaatccagcatctaaacagaaccaaagacaaaaaacacatgattttctcaatagatgcagaaaagggcttcaacaatattcaacagcccttcatggtaaaaactctcaataaatcagatattgatggaatgtatctcaaaataataagaactatttataacaaactcacagccaatatcatactgaatgagaaaaaactggaagcattccctttggaaactggcacaagacagggatgacctctctcaccattcctattcaacatagtgttggaagttatggccagggcaatgaggcaagagaaaggaataaagggtattcaattaggaaaagaggaagtcaaattgtccctgtttgcagatgacaagattgtaaatctagaaatccccattgtctcaacccaaaatctccttaagctgataagcaacttcagcaaagtctcaggatacaacatcaatgtgcaaaaatcacaatcattcttatacacccataacagatagagaaccaaatcatgagtgagctcccattcacaattgcttcaaagagaataaaatacctaggaatccaacttacaagggatgtgaaggacctcttcaaggagaactacaaaccactgctcaacgaaataaaagaggatgcacataaatggaagaacattccatgcttatggataggaagaatcaatatcgtgaaaatggccatactgcccaaggtaatttatagattcaatgccattcccatcaacctacaaatgactttcttcacagaattggaaaaaactactttaaagttcatatgaaaccaaaaaagagcccgcattgccaagtcaaccctaagccaaaagaacaaagctggaggcatcacactacctgacttcaaactatactacaaggctacagtaaccaaaacagcatggtgctggtaccaaaacatagatacagaccaatggaacagaacagagcactcagaaataataccacacatctacaaccatctgatctttgacaaacctgacaaaaacaagaaatgaggaaaggattccctatttaacaggtggtgctgggaaaactggctagccatatgtagaaagctgaaactggatcccttccttacaccttatacaaaaattaattcaagttggattagagacttaaatgttagacctaaaatgatagaaagcttagaagaaaacctaggcaataccattcaagacataggcatgggcaaggacttcatgtctaaaacaccaaaagcaatggcaacaaaagccacaattgacaaatggaatctaattatactaaggcgcttctgcacagccaaagaaactaccatcagagtgaacaggcaacctacaaaatgggagaaaatttttgcaatctactcatctgacaaagggctaatatgcagaatctacaaagagctcaaacaaatttacaagaaagaaacaactccatcaacaagtgtcctgtagtttttttgttgttcktgtgttctttcatgtttttaatatcgtggagatactggatttgtacaatgatttagagaggtattcctmcactttgattttttggaatagcctcagtaggatgacaccagatcttttctgtacatctggcaaaacctgactgtgaatctgtctgttcctgttcttttgtttgttggaagatttgtattactgattagattagtgattagatctctttgttggaagatttgtattactgactagatttttttttttacttgtttgtggtctgttcaggttttctatttcttgctagttcaatcttgagaagttgtatgtttccaggaaactatcaattttctctagattttctagtttgtgtgcatagaattgtccatattagtccctgattgtctttggtatttctatggcataagttgtaatatcaccttcatcatttctgattgtgcttatttgaatcttctctgcttcttttttgttttttcattagtcctgctaggggtctgtcaagtttttttctaatgctttcaaagaactaaattttctttcattaatcctttttagctttttgtggtctcaatcctatttagttaatcctggccatgttatttcttttcttctgctagctttggatttggtttgttcatgtttttatatttccttaaggtgtgaattagtttgttaattttagagctctctctccttttcatgtaggcatttaatgctataaactttcgttttagcacttttttgctgtgttttagatgttttgttatattgtgtctgtttttatacacttcaattttttttaaatttctgccttaatttcattgttcacccaaaaattatttaagaataagttgtttagtttccatgtattagcatagttttgagagattttcttgttattgctttctaaatttattccactgtggtctgagaagagacttgatattattttacctttttgaatgcgttgagacttgctttctggccaagcatatgttcaattttggagaatgttccatgcacaagtgagcagaatgtatattctgtggttgttgtgtatgctatagtgtaaatgactactacgtccatttgatctataatccagttaaatcttgttgattttctgccttgattatctgtctagtgatatcagtggggtgttaaagtcccactattgatatgttgctatcaatctattttcttaggtctagaagtatattttttataaatctgratgttccagtgtctgttgcatatataatttaaataaataaatcttcttttattggagcttttcttaatatataatkaccttatttatattttagtaccattgttgatctaaagtctgttttatctgatatgaaagtggttattcctgcttgcttttgtttttcatttgcatggtgtatctttttccaccgttttactttgagtctcattgtgcctttggccagtaggtgggtctcttgtagactgcagatggttgggtcttattttgtgactctgtatcctttaagtggagtatttatgccatttacatgcaagattaatattgatatgtgaggttttcttcctattacaatagtgttagttattttggagtttccattgtgtaattgctttgtgtgatctgtgaactttgtacttatgtgtctttgtctgacagtgagtatcttccatttgttttcatgtttacaattcatttaagcattttttgtatgtccaatctagtggtgatttttttaaaattttacattaacttctgggatacacgtgtagaatatgcatctttgttacataggtatacatgtgccatggtggtttcctgcacctatccgcccatcatttaggctttaagccctgcatttattaggtatttgtccaaatgctctccctccccttgtcccccgcccccaacaggcctcagtgtgtgattttcccctccctgtgtccatgtgttctcattgttcaactcccacttatgagtgagaacatgtggtatttggttttatgttcctgtgttagtttgctgagaattatggctgccagcttcatccatgttcctgaaaaagacaagagcttgttcttttttatggctgcatagtattccatgatatatatgtgccatgttttctttacctagtctatcactgattgacatttgggttagttccaagtctttgctattgtaaataatgctgcaataaacatatgtgtgcatgtgtctttatagtagaatgatttataatccttcaggtatatatgcagtaatgggatttctgggtcaaatggtatttctggttctagatcattgaggaattgccacattgtcttccacaatcattgaactaatttaaaagtgtaaaagcatttctattcctccacaggcacaccagcatctgttgtttcctggtttgttaataatcgccattctaactggcgtgagatggtatctcattgtggttttgatttgtgtttttctaatgaccagtgataaggagcattttttcatatatctgctggccgtataaatgtcttcttttgagaagtgtctgttcatatccttcacccaatttttgatgggattttttgtatctttcttgaaaatttaaattccctgtagattgtggatattagacctttgtcagatcggtagcatgcaaatctttttttccattttgtaggttatctgttcactctgatgctaatttcttttgctgagaagaagctatttaatttgattagattgcatttgtcaacttcagcttttgttgcaattgctcttggtgttttattcatgaagtatttgcccatgcctatgtccagaatggtattgcctagggtttcttctgggtttttatggttttgggttttacatttaagcctttaattcatactaagttaatttttgtataaaatgtaaggaagggattcagtttctgttttctgcatatggctagccagttttttcagcatcatttattaaatagtgcgtctttccccattgcttgtttttgtcaggtttattgaagatcagatggttgtagctgtgtggtgttatttctgaggtctctgttctgttccattgatctatatatctgttttgataccagtgccatgctgttttggttactgtacccttgtagtatagttttaagtcaggtagcatgattcctccagctttgttctttttgcttaggattgccgtagctaaatgggctcttttctggttccatatgaaatttaaagtagttatttttaattctgtgaagaaagtcaatgatagcttgatgggaatagcattgaatctatgaattactttgggcaatatggccattttcaggatattgattcttcctatccatgagcttgaattgtttttccatttgtttatgtcctttcttatttccttgagcagtgttttgtagttctccttgaagaggtctttcacgtctaatggaagttgtattcctaggtattttattctctttgtagcaattgtgaatgggagttcaatcatgatttggctgtctgcttgtctattgtttgtgtataggaatgcttgggatttttgtacatcgattttgtatcctgagactttgctgaagttgcttatcagcaacttaaggagtttttgagctgagacaattaagttttctaaatatacaataacgtcatctgcaaacagagacaatttgacttcctctttttctacttgaataccctttatttatttttcttgcctgatttccctggccagaacttccaatactgtgttgaataggagtggtgagagagggcatccttgtcttctgctgggtttcaaagggaatgcttccagcttttacccattcagtatgatatcggctataagtttgtcataaatagytcttattattttgagatgtgttccatcaatacctagtttattgagagcttttagcatgaaagggtgttgaattttatcaaaggccctttctgcatctatcatgtggattttgtcactggttctgtttatctgatggattacgttttgattttcatatattgaaccagccttgcatcccagggatgaagccgacttgatcatggtttataagctttttgatgtgctgctgagtccgttttgccagtattttattgaggattttcacattgatgtacatcagagatggtggcctgaaattttccttttttgttgtgtctcttccaggttttgttatcaggaagatgctggcctcataagatgcattaaggaggaggccttcttattctattgtttggaatagtttcagaaggaatggtaccagctcctctttgtatatatggtagaatttgactgtgaatctgtctggtcctgggctttttaaattgatgttcttggacttttttttttttaattactgcctcaatttcagaatttgttattggtctattcagggtttctaattcttcctggtttagtcttcagagggtgtatgtgtccaggaatttatccatttcctctgtgttttctagtttatttgcatagaggtgtttacagtattctctgatggtaatttgtatttctgtggaatcagtggtgatatcgcctttatcattttttattatgtctatttgtttgttctctatttttttcattattagtctatatagtgatctatttattttgttaatcttttcaaaaaacctgttcctggagtcattgatttttttgaagggtttttcatgtctcaatctctttcagttctgctctgatcttagttatttgttttttaatttttaataatatgttatttatgttatagtattggcttaaaagacacaataatataattacactgctacatattcatgaaaaattatttcatcaacaaagcaggatattaagctgtaatgggtacagcttttaataatcatatatttacttagtagaaaaaaatctggactactataaactaaaacatttactgtggctgtttttgttttgatttatactttcttttgtttattgctatgttctaaattttctttttatatatattattatactttaagttctagggtgcatgtgcacaatgtgcaggtttgttacacatgtatacatttgccatgttggtgtgctgcacccattaactcgtcatttgcattaggtatatctcctaatgctatccctccccgctcccccaaccccacaacaggccccggtgtaagatgtttcccttcctgtgcccaagtgttctcattgttccattcccacctatgagtgagaacatgcagggtttggttttctgtccttccaatagtttgttgagaatgatggtttccagcttcatccgtgtccctacaaaggacatgaactcatccttttgatggctgcatagtattccatggtgtatgtgtgccacattttcttaatgcagtctatcattgttggacatttgggttggttccaagtctttgctactgtgaatagtgccacaataaacatacatgtgcgtgtgtctttacagcagcatgatttataatcctttgggtatatacccagtaatgggatggctgagtcaaatgctatttctagttctagatccatgaggaatcaccacactgtcttccacaatagtagaactagtttatagtcccaccaacagtgtgaaagtgttcctatttccccacatcctctccagcacctgttgtttcctgactttttaatgattgccattcgaactggtatgagatggtatctcattgtggttttgatatgcatttctctgatggccagtaatggtgagcattttttcatgtgttttttggcttcataaatgtcttcttttgagaagtgtctgttcatgtcctttgcccactttttgatggggttgtttgtttttttcttgtaaatttgtttgagttcattgtagattctggatattagccctttgtcagatgagtaggttgtgaaaattttctcccattttgtaggttgcctgttcactctgattgcagtttcttttgctaaagaagctctttagtttaattagatcccatttgtcaattttggcttttgttgtaattgcttttggtgttttagacatgatgtccttgcacatgcctatgtcctgaatggtaatgcctaggttttcttctagggtttttatggttttaggtgtaacgtttaagtctttaatccatcttgaattaatttttgtataaggtgtaaggaagggatccagtttcagttttctacatatggctagccagttttcccagcaccatttattaaatagggaatcctttccatatttcttgcttttctcaggtttgtcaaagatcagatagtggtagatatgtggcattatttctgaggactctgttctgttccattgatgtatatctctgttttggtaccaataccatgctgttttggttactgtagccttgtagtatagtttgaagtcaggtagcatgatgcctccagctttgttcttttggcttaggattgacttggcaatgtgggctcttttttggttccatatgaactttaaagtagtttttcccaattctgtgaagaaagacattggtagcttgatggggatggcaatgaatgtataaatgaccttgggcagtttggccattttcacgatattgattcttcctaccaatgagtatggattgttcttccatttttttgtatcctcttttatttcattgagcagtggtttgtagttctccttgaagaggtccttcacgtcccttgtaagttggattcttaggtattttattctctttgaagcaattgtgaatgggagttcactcatgatttggctctctgtttgtctgttattggtatataagaatgcttgtgatttttgtacgttgatttttgtatcttgagactttgctgaagttgcttatcagcttaaggagattttgggctgagacaatggggttttctagatatacaatcatgtcatctgcaaacagggacaatttgacttcctcgtttcctaattgaatgccctttttttccttcccctgcctaatttccctggccagaacttccaacactatgttgagtaggagtggtgagagagggcatccctgtcttgtgccagttttcaaagggaatgcttccagtttttgcctatttagtatattggctgtgggtttgtcatagatagctcttattattttgagatacgtcccatcaatacctaatttattgagagtttttagcatgaagaggtgttgaattttgtcaaaggccttttctgcatctattgagataatcatgtggtttttgtcttggttctgtttatttattgattttcgtatactgaaccagccttgcatcccagggatgaaacccacttgatcatggtggataagttttaattgatagaccactagcaagactaataaagaagaaaagagagaagaatcaaatagacgcawtaaaaaatgataaaggagatatcaccaccaatcccacaggaatacaaactaccatcagagaatactacaaacaccgctatgcaaataaactagaaaatctagaagaaatggataaattcctcgacacatacaccctcccaagactaaaccaggaagaagttgactctctgaatagaccaataacaggctctgaaattgtggcaataatcaatagcttaccaaccaaaaagagtcctggaccagatggwttcacagccgaattctaccagaggtacagggaggaactggtaccattccttctgaaactattcctatcaatagaaaaagagagaatccttcctaactcattttatggggccagcatcatcttgataccaaagccgggcaaagacacaaccaaaaaatagaattttagaccaatatcctcgatgaacattgatrcaaaaatccttaataaaacactggcaaaccgaatccagcagcacgtcgaaaaccttcaggtgctcttttaaggctggtttggtggtgacaaagtttctcagtatttgtttgtctttgaaagattttatttctccttcccttatgaagcttagtttgtttggatgtgaaattttggtttggaaacgattttctttaagaaagttgaatgtttgcccccactgtctttaggcttgtagggtttctgcagattaatccattattggtctgttcggcttccctttgtaggtaacctgacctttctttttggctgctgttaacattttttccttcatttcaatattggagaatctggcgattaggtgtcttggggttgctcttcttgaggagtatcttaatggtgttttctgtatttcctgaatttgaatgttggcctgtcttgctaggttggggaattttcctggataatatcctgaagtgtgctgtctaacttgattccattctccccatcaccctcagggaccccagtcgatcgtaggtttgttattttcacatagtcccatatttcttggaggctttgtttttttttccttttcactcttttttttttctaatcttgtaatcttgccttatttcagtaaggtgattttcaatctctgatatcctttcttccacttgatctatttggctattgttacttttgtatgcttcacgaagttctcatgctttttttcagctccatcatgtcatttatattcctctctaagttggttatttaagttagcatttcctgtaaccttttatcaaggtttttaggttccttgccttgggttagaacatgctcatttagctcagaggagtttgttattacctacatactgaagcctacttctgtcaatttgtcaatctcattctctatccagttttgtgcccttgctggagaggagttgcaatcttttggagaagaggctttctggtttttggaattttcagtgcttttgtgctgttttttttcctcatcttcatgtatttatttacctttgatctttaaagctgataaccttggatggggtttttgtgtggggttctttatgttgatgtcgatgttgttgctttctgtttattagtttttcttctaacagtcaggcctctcttctgcaggtctgctgcggttgctggacgtccaatccagaccctgttctcctgggtatcaccagtggaggctgtagaacagcaaatattgctgcctgctccttcctctggaagctttgtcccagaggggcaccaacctgatgccagctggagctgtcttgtatgaagtgtccttcgacycctgttgggaggtctctcccagtcggatgcacaaggtcagggacccagctgaggtggcattcggtcccttggcagagctggtgcactgtgctgggagaatccctcttgtcaggattagttgttctcttcagagccagcaggccagaatgatgaaatccgctgaagctgctcccacagctaccccttcccccagatgctctgtcccagggagatggtagttttgtctgtaagcacccgactggggctgttacctttccttcagggatgccctacccactgaggaagaatctagggattcagtctggccacagccactttgctgtgcccagcccagacctcccagcctcctcagtgctttcaggggaaaactgcctaccaaatcctcagtaatggtgaatgcccctccccccaccaagctcaattgtcccaggttaacctcagactgttgtgctggctgcatgaatttcaagccagtggttcttagcttgctggactccctggcagtgggacctgctgagcaacaacactaggctccctggcttcagacccctttccaggagagtgaacagttgtgtctcactcaggttccaggtgtcactggggttccaggtgccactgggatatgrcaaaaatatgcctgcagctatctcagtgtcaaaacagccacccagttttgtgcttgaaactcagggccccggtggtgtaggtacacaagggaatcttctgatctgcagattgtgaaaaccatgggaaaagcatagtaacctagctgggtagcgcagtccttcatagcttcctttggctgggagagggaggtcccccaacttcctgtacttcctgggtgaggcaatgccccaccctgcttctgctcaccctcctgtgggttggacccactgcctaaccagtccctacgagatgaactgggtacctcagttgaaaattcagaaatcatccaccttctgcgttggtctcaatgggagctgcagaccagatctgcttgtattcggccatcttggcttcattccctcaatttttttttttttttttttttgcttgtctgggaaatattttatttctccttcatttatgaaagagtttggcaggatataaaatttttggctgcaggtttttattttttaaaggagttaaaatagcccccagtctcttctgagttttgggatttttgcagagaagtccactcttagcctgattggttttgttttataggtgctttgatccttttctctacctatctttaatgttttcttctttattatttactttagatagtctgatcactatataccttcataatgtttattttaaataatatctcacaggtgttctctgagtttcttgtatgtggatatctttctagcaagattagcaaaatgttcctgaattatttcctcacgtatgttttcaaggttgtttatgtttttcttcctctctcttagaaatgccaatatgttataggttttgttgctttacataatcccatatttcacaaagactttgttccattttttaaaattatttttttctttatttttgtctgaccagtttagtttgagagactgatcttcaatctctgaaattctttcttctacttggtctagtctattattaaagtgttcaactttattttgaaattccttaagtgaatttttcatttccagaagtcctgtttgattttttaaaaaaatatatttatctcttccttcatatcctgaattgccctcatattttctttttggttggttttcagtcttgtcttggatcttgtggagcatcctgacaatccacagtttgaattctttatctgtcatttctgagtttccattttggttaaggtccattgctagaaagctagtttgactcttgttgatatcacaacattcagctttttcatggtgccagatttcttatgccgagttcttctcatctggaggtattgtcacttacttttgaaatttatttttgttcagatggtatttttctttccctattttttcttcctccctcctgagaatgttactgtgtagtattctgggtagagtccttggctctgctcctatttcctgtgcactgggggcaacttttttttttttttttttttttttttttttttgaracggrgtttcgctcttatttcccaggccagaatgcaatggcgcacaataaatctcagctcaccacaagctccacctcccgagttcaagcgattctcctgcctcagcctcccaagtagctgggattacaggcatgggcatgtgccaccacacccagctaattttgtatttttagtagagacgggatttctccatgttggtcaggctggtctcgaactcctgacctcaagtgatccacccgcctcggcctcccaaagtgctgggattacagacatgagccactgcgcccagccactggcaacttttttattgcgcttttcactttgacctgctggccagggggtagcacttaagggtaagacacagatgtggcacaagaagatgggtatttcatctctgttgtttcaggtaatgagctagatcgtggtgttccctatgccctgagcttgcttcttaactgtggctggggagacacacctgatctgatttggaccctttggcttgcccacaaatactccaatgatgactacaggcactagtcttgataggggtggctgggggaactcctggtacaaacacttaggcctctgctggaagtgagggggatgcactgccttcatgtcgtaaataggcaggaacacaatctgttcccttttcacgcccttgttgtagggctcatcatgtacacttcagatgcacgttgttgtctctccaggccacagtgtgtctgagagccagggagaatgcctctcttgcaactcyccatggaggtgtttttgaagcagaatatatttactcactcaacccaaatacagacagctttatggctcacatcttctttgacatattagtgttgctgcttcgtggaagkgagaggtctgcctttcagcccatgtggtgagtgtcatttgtggtggtgtaagctagttaggttagtctgacctcaggtgccaggaggactggataggtactagctgtgttagactgggctaggtagctcaccagtctccaggcccctagatggccaattggatgacatttacgagtcctgaaggggctggacctgggttgagccagcccagagttcagtgctgtctrtgtaatggggagagttgggttggtccctgggtcactggctgaactctcaggcaggtcaggcagaccagtcaggtggtgggaacctgagggtggataactggcctgtggttattgggctctccaagaggctctgggctgcagctgaaatattcagttgggggcaagccagccatgatgtggacctttcattgggtagggcaagtccccaaagttggaaaaatggaaagtgggagctgtgaggcacgtgttacacccacactttcctcctacagatgcagtgttggattttgttgtgggaggcatgcacaggtaggtgccaggcctccctactctctccctggcccagaggtgtcaggggcaaagttagtggcagtggtggctgcaaaatggttggcagcaatctgtgggatttgggctatcaaagaaatgccaagccatggccacagtcttcaagcaggggcaggggaaggtgcactggtgacctggagcctgcaaaccccatttggtgtgaagcagtataagtggggagttgtgtggcatgcagcaaacctgttgcttctttgtacttcagctgtggtatctgtgctgaaggctgcagaagtgcctagctttcccatttcctccctagcccaggggaaggagggatggcataacttctgttacttaaacattggttattttgatagcgtcccataattctcagaccttcttcattattttttcttatactttctttaactaccttacctttccttaaataattctacttataacattccttaactacttctgaattcattatcagtcatttcatagatctctatttattcagggtccataattagaggtttattagtttattttgtgattttaaaaaattatttgtaatttttgtgttcttgttttggtgcctatgtgtttgggtacatggccacctctttcagcctttgtaggtgttctttggcaatgataatctttcagtatttattctaacctgggatttttggtggaccaactgatagcaaccctggacagctgaccttgctcttgggttctctagctggggtgagctgctgcctatagtttgaggttgagtggaatggtgagctgtgctttgtagtctgatgagacaactagctgggttttaatttggcagtgctgatggctatcctttgcaatcacctctgatcagattgcattgcatgctgccttccccagtaaaacagtactgctgtttggaatctgtagtcagtcagggccatgtgctggtgctcttaggctcgaggaggtctctggggttactgttcagccacctgggacaagacacattaggtacttcctttcacagatattcatggatcagcacttgccttctggcctgaggaagccttaaagagaatattaagtgttagtgggattgtcatacagtcagtggggttgggtgggrccagatgctctacagttgcctcccagcctggaaaaggctcaaggagagaaatgacattacataaggaagctggctagggacttcagctaagcaaactcatgcactatggttcctgcagggcagtcctgttggctgttttctatcatttggcaccttcattgacaaaagtgaagagccactgccaaaatccatgtgctcatcattgtgaaccccaccctttttctttgtttctaacaaatctcaggtgccctagctctgctggtactcccaatgtttgtcatggaatgagacaagagtgagcttcctgtaaagcaccccacaatgatgaggaagctggatatatgtttacagctctcttttcccctacagaaacaagagcccaggggaatcttctttggcactgttacagcttgagagagggtgatgcgaaatgaaaccattcctcttaccctttgaatgcagctgttatctgttctgtggctggaggggctatctcccaaattcagggatattcatgaaagtattcttatctgcggatagttagtagttggatttatgtgacggggactggaactgcagaactcctcctattccgttatcttgctgacatcactctctttactttcctctcaatttacttttaataaaggaggtttcaagacagttcaatgaagaattaatagtcttttcatcaaatggttctaggacaactggatatctacgtgcaaaagaataaagttggagcctttccacacacccaccgtatacaaaaactaatgtaaaataaataggagacctaaatgtaaaagctaaaactctaatatttttataaggaaacatgagtacatcttcatgaccttgagataaaaggtttcctagatacagcttcaaaagcccaggcaataaaagaaagcatgataaattagaatttgccaaaattaaaaaaaaaaactatatttcaaaatataacaataaagtaaaaaggaaagacactgaccaggggagaatatttgcaaattatataacgcctggggatttatattccaaacatatgaaaaactcttacaactcaataataagacgataacccaacttaaaatgcacaatggatttcaatagatatttccctaaagaaaacatactaattgcccataagtgcgtgagagaatggtcaatataattactcattagggaaatgcatattaaaatcacaaggagttatcaatgcacattcactaaaatagttataaaccaaaaggataagggttaatgagcatgtggagtaactgggaccctcatacatttctggtaagactgttgtcamattggtgcagactctttggaaaacaatttggcattttcttaaaatgttaaatgtaaatttgtcataagactcaactatttcattcatytttatatgtatatatatgctcaagaaatgaaaataaatattcatacaaagacataaacaaatgtgtaattatattgctgatttttgcagcataattagtaatagccaaaagtattagtccaactgtccagtaactggtgaatagataatcaaaatttggtatatttattcaatggaatagtctttgtccataaaagaaccatttatataaaccttgaaaacattgtgcagagtggaagaaatcagacaaaaaatgttacatattatataattcaatttctagaaagtgttcagaataggaaatctatatggataaaaatttaattactggatactggggattgggggaatagagaaatggagatttctagattgtggtgatgcttgcacaattctgtaaatttattagcaatcattaaactgtacatttgaaacggggaatcttattttatataaattatgctgcaataaagttttataacagcatgaatgaggtaaataatgacaaatcacaactctagattagtgtgaaatgatattacaaaatgtttatagcttaaaagaaaatccatatatttaagaatatattattctactttataatttactctgatttttctgaaagtgctatggaaaacaaattagaaataacgtcatgtgaaagaactttaggctattattcacactttctgcattcagatytcaattacagcttttgctagccaagtgatcttggatatgttatctaacttctctattcttcagtcatttcatcagaaaaatagtgataattaatagcttctatattatgagcttgttgtgatgtcaaatatttaatacagataaagttcctaaatattattaagtcctaagtagatagtaaattataattatatattttcacctatttattattggtaaaataattgaaaaaatacgktttcaggaacaggtcttgatttctcacttattttgtttgttttcttcaggtgtcttcagtgccctgggtttgcctgtgacccaatgcccactgggactgaatgccaaaggactccctttaggcatccaggttgtggctggaccctttaatgatcatctgaccctggctgtggcccagtacttggagaaaacttttgggggctgggtctgtccaggaaagttttaggaggaccttctgcaaggttaatgtgtgtgtgtgtttgtgttcgtgtggtggtgtttctattaattgggtgaaaycaagcaccagcagacaagcagagaaacaactggggaatttattgactcatttagttattctttctacttttatttccttctctaactgttggtcttactaaaatggtaatatttgcttcttgcttttatgttactggaaaattaggacatgtaaatggataagtgcaataaagtttcctaaatgctggaatcgtgtctgttttgggtacagcagggaaattaaagaagggaatgtccagtgctaatgaggggatcttaagaaactttagagaagagatgttgctgaaactgacaaatggagagttacgtgttttcgaggcaggccattaagtaagggaattccagttagaagaagctacagtgaagaaggcaaggacatgctgctgtaagttagtatggctggcgggaaactggaggggggtatgtaagtaatgagaccatggtaaggaaagctcttccaatatcccccaaaaatgttttataattttgttcactaagagatcctagaagcaacaggtcctagaacaacattacacgtatgattatatatattatataatcatatatatgttatatatcatatatcatatatataatcatatatataatggatttagaaagtcattgttttgaaaccatcaaataatacttaattcatacatagctcatcaatggatcctaaaaccactggataaaagtttgacaaacagaatatttttagtctcaaaatatcttttcacttaccacttattaatttcaagagtggggaatattacctgtagagtgcagatatatggtagacaccatcataatcaaatagccaacattaatctgagcaacaaatctatgatgtccctgacaagaatgcatcacctgaatctaattgtaagaaataatcagaagaaaccaaatttataaacatcttacaaaattaagggcctacattattcaaatatgtcaaagaattaatgccagtgacaggctaaggaactgctccagaataaagatgaataaagacccatgataactaaattcaatgtgtgatctcaaattggaaaagtaagatttttaaaaaagatagtgttaagacaattggacaaatataaatgtaggatgttttgtagataatgtactgtggcaatttctgaatttcattttgtttttatttatttatttttttgttatactttaagttctgggatacatgtgcagaatgtacaggtttgtcacataggtatacatgtgccatggtggtttgctgcacccaccaacccgtcatctatattaggtatttctcctaatgctatccctccccccactccctgacaggtcccagtgtgtgacattcctctccctgtgttcatgtgttctcattgttcaactcccacttatgagtgagaacatgcagtattgggttttctgttcttgtgttagtttgctgagaatgatggtttccagcttcatccatgtccctgcaaaggggacgagctcatcctttttttatggctgcatagtattccatagtgtatatgtgtgtcacattttctttttcctgtctatcattgatgggcatttgggttggttccaagtctttgctattgtgaacagtgctgcaataaacatacacgtgcatgtgtctttatagtagcatgatttataatcctttgggtaaatggcatttctggttctagatccttgaggaatcaccagactgtcttccacaatggttgagctaatttacactcccacaaacagtgtaaaagcattcctagttctccacatcttctccagcacctgttgtttcctgactttttaaagatcgccaaactggcatgagatggtatctcattgtggttttgacttgcatttctctaatgaccagtgatgatgagatttttttcatatgttatttggccgtataaatgtcttcttttaagaagtgtctgttcatatccttagcccactttttgatgggaaagcttttttcttgtaaatttgtttaagttttttgtaaattatggatattagccctttgtcatatggatagattgcaaaaattttctcacattctgtagattgctggttcactctgttagtttcttttgctgtgcagaaagagagcacctgggggaaggggtagctgtgggtgcagcttcagcagacttaaaccttcctgcctgctggctctgaagaaagctgcagatctcccagcacagcgctcgagctctgctaagggacagactgcctcctcaagtgggtctctgaaccccattcctcctgactgggagacacctcccagcaggggtcaacagatacctcatacaggagagcttcagctggcatctggcaggtgccccttggggacaaactttgcagaggaaggaacaggcagcaatctttgctgttctgcaacctccattggtgatacaaaggcaaccagggtctggagtggacctccagcaaactccagcatgcctgtagcagaggagcctgactgtttttgcatctatatttattagaaatattgacctgtagtttcctttttttagcttctttgtctggtttcagtattgtagtaaccttggcatcataggatgagttaggaagaatccatcctcctcaattttttggaaaagtgcagtgttagttctttaaaagtttggaagaacttggtagtgacgccaactattcctagagttttctattttgggaggcatcttattactgatgtaatctcattattcattattagtctattcagattttatgaacatatatgtgccaaacactggaacacccagatgtataaagcacatattatatgtaagtcaaagaaaagatttcaatactctactagttgaggactttaacatactactctaagaattaaacacataatctaggcagaaatttaaaaaagaataattggatttaaaccgcactttagaccaaaggaacctcatagacatttatggaactttatatctaagaactactgagcataaattttttatcagcacgtagaacattctccagaattttacactgtaggttaagccacgaaaagatctcaacatattgaaaaaattaaaatcatataaagtatactataagaccaaatggaataaaactagagataaatagcatgagaaacattggaagccatataaatacacgtaaattaatcaacaggttctgaataaccatgggatcaacagagtaattaagatagaagtcaaaaaatttgttgaaacaaatcaaaatggaaacacaacataccaaaacttgtgagacacagcaagagcagtgctcagactaaactttatagcaataaatgcctatattaaaaaaaagtataaaagattacaaattagcaatctaacaatgcactgcaatgaactaagaaaacaagaacacaccaagcccaacattatgagaagaaaagaaataacatagaccagagcaggactaaattatgtagacagtaaaaaaaacagaggattcataaaacaaaaaagatggttgttcaaaaagataaacaagattgataaagtgctaactagagtaaccaacaaaagaaaagagaatgtccaaataaagaaaatgataaataagtgggagtgctatgcaattcttgcacttctacgaagaaatatatgagatggtaatttttaaagaaaagaggtttaattggctcattattctgtaggatttacatgaagcatggtgccagactctgctcaggttccagcaattctactattgggtatctacccaaaggaaaaaaataatatatcagtgggatacctgcattctcatgtttaatgaagcagtattcaaaaacacaatgatatggaatcaacctaagtgtgcaacaacaggtgaatgaataaaaaagtgtacaatatatacacaatgaaatactttttggccattaaaaacaaacaatgagatcatgttattttcagcaacaaggttgggactgaagaacgtatgaaatatgccaggcacaaaaacataaatattgcatgttctcacttacatatgggagctggaaaattttatcacatggagatatagagtggaaagatagataacagagactgagaaggatgattggggctgagggtggaggataaaaaatagtggattaagatgtacaaatcatagaaggaataaatttaatgcttgacagcagagaagtgtaactgtagtttaaaaaaaattgtacttgagtgacaccctaaataccctgactcgatcactacacattatatacatgtaacaaaatttcacatgtaacttataaatttttacaaataaaaaaattttaaaaataaatcttatcaagtatctcctcagcccacaattgaataaaactaggaatcaataacaagaggaaatttagaaactgtacagaaatatggaaattaagcaaaatgctcactgggcgtggtggctcatgcctgtaatcccagcactttgggaggccgaggttggtgcatcacttgaggtcaggagttcaagaccagactgatcaacatggtgaaaccccctctctactaaaaatacaaaaaagctagccgggcatggtggtgggtgactgtaatcccagctactcaggaggctgaggcaggagactcatttgaacccgggaggcagaagttgcagtgagccgagatcatggccactgcacttcagcctgggtgaggaaacaagactctgtctcaaaataaataaacaaacaaacaaaatgttcatgaatgaccattgggtcaaggaagaaataaaggagaaaatgcatttctggaaacaaatgaaaatcaaaatacaatgtaccaaaacctatgggatacagcaaaacagtgctaagaaggaagtttatagcaataaacacctacatcaaaaaagtagaaaaagactgggcacagtggctcacctggtaatcccagcactttgggaagctgaagtaggaggatttcttgagcccaagagtttgagactagcttgggaaaaaaaagcaagaccctgtctttacaaaaataaaaataagaaaattatctgggagtagtggtacacaactaaagtcccagctgcttggccggaagatgtgggaggatcacttgagcctgggaggtcaaagctgcagtaagccatgattgcacgactgcactccagcctgggcaacagagaaagatcttatctgaataaaataaaataaaataaaataaacaatctaacaatacacctcaaagaaatggaaaagcaagaaccaaaccccaaatgagtacaagaaacaaaataacaaatatcaaagcagaactaaatgaaatagagaccaaaaaatcaatacagagtgtcagtaaaacaaaaagttgattctctttgtttatctttttgattgataaacaaaattgataaaccactagctagaatacccaagaaaatacccaaaggaacaaaatcagaaatgaaaaaggagacatcataacagatgccacagaagcacaaaggattatcagagactattataaactaacaaactggaatgcctagaataaatggacaaatctctggacacatacaccttctgaggtcttattcagagtattatatcacttcacatgaatcctatcctactataggttacctggattttccaggtgataggaggatgtctgtgacatcaagaatggcagtctcatctaaaattatgtaacacaagcaatgtatagtcagaatggaatgctcatctaccttatataacataaataatatatagtcagagtgaataaaagggaaatggttttggagtcaggtttggagccagacctaggtatgattcttgccttgctgcttattagcttagttgcctaaccaatctcagcctgttttgtcatttatagaagggaggatttgacactcatgcctcattattatttatagaaggaaggaagggagaaaatgacacccaaaaaaagcctcattcattattgatcatcacaaaaggttatgattgaaattgtcaatttttctcccctactagactgtaatcttttaagtactctgaaacatctttattttcaccaaactcacaatacagtatttcacatggtaagtgtcagtttacctcaacagttcttgttgactagtactaaattaggcctcattctagtatattttcctca

SEQ ID NO: 94441 - DNA, 40152 bp, Homo sapiens
gctcttctgtccacagtgccaacttccacagttatttcatggatatatataggatgtgcaaaattttataatccactggctgtttcagtcttttctgatttgccctttaagatcttttgctctgagaagaatcaaagggtcttctttgagtcacacactttatgaacttttttttttaaaagggactgctgatttgaaagtttgggtgttcacttctcctgaattctgggttctgaattgcagttataggcaagcaggttgtatgaccttacttcattttcccttttctaaatatgtgggtggtggacatcctatgcatatatttggcttaagcaaataatccttaaaagttattaccagggagactgctgggggactgcattctcttttggtgttttccatgctaaagttcctttgacccagcccttggctctgtgggttgatctgggcaaaagtggacctgtactatggcgtggtttcatgcagggaagtgtccagtcaaggaatgatagaagacttttcaggtctattggcttaggtagtgaaccattctgctggattccatcctaactcacagttttcctcctctgactgctataattctccagatgtgctgatgtagtttgatccagctttgccttcctggattaatttatttaataaatatgtatggggccctctatgacattggacatgattataggctttttggaacgtagcaggaagcaagacagcctaaggtccctatgcaggtacagataaacaataaagtagacaactgataagttagttgcaggttgtggtaacagctaggaggggagaaacagtgtgatgtgatgagtgaagcagattgtttttgggagaggatggtcagggatgtctcatctcatcagggcggtgacagttcagctgagatcttcatgccaacagacagccaatcatgagaaggtgaggaacaccattttatgaaaagggaatgataaatgtgaagatccagaggcaagaaagttttgattgtttatggaatagaagggaggccaatctggctgtggcattatgagtaaaagggagagtgatgaggaaatgcgttggaaggatgagcagatcatgcagtgcccgagagagctagagatcagtttagagtggaatgggaaggtatagaaaggttttaaataggtgagacataggatttgattttacttttaaaaactctttcaggctgttgtatggagaacagtgtggcaagcagcaggagagatgatggggaagccgttgctgaagctattagtttagacttagattttttttctctaaccttcttcttctatttttttttttgttttgttgttgttgtttgagatggggtcttgcactgtcacccagaacactggaatgcagtggcatgatcctcaacttcccagaccaagtgattctcctacctcagcctcctgagtggctagaaccatagctgcacaccagcacacccggctaggtttttaacgaatttttaaattttgcagaggtatccctttgttgcccacgaaagcctcaaaattctaggctcaattgatcctcctgcctcagcctcccagagtactgggattataggcgtgcgccttcatgcccagccatctctaaccttcttgatgtcttcaagtgccagatcttattcagctgagtatccctgctctagaaatctattctagctgactactggtctcaggaggttttattctgataggtcatttatatattttccaactatcctttatctatccctctatccatccatctatcccagaaatgttcattgagatgttcctatatgccaagtccagaatcaagcatacagtttcttgtctggagccattcatagtctatttgtggagaaagacatgcaaataaagaaatatgaccaggtgtaataagggttgtaatattggaatgtgcaaagtacaataggaaggacagagaaaatagcctgggttaatattcgatgatagttgaaagttgaacaatgccttgaaaagttaataggaattttccaaacaataagtatagtatatatatgagtatatatatgagtatatatatatacacatatgagtatatatatatataagtatatatatatgagtatatatatatgagtatatacatatgagtatatatatatgagtgtgtatatatatgagtatatatatatatatatatgagtacatatgtatatatactcattaagtatgaaacactactatttcttaaactcctactaggtgctaagcattgtgttctgaacttcaaatacatcatcttactctaactttttcccaacctactggctgagggagtataatccccattttatacaccaggactcagaaacacagagagatcagaaaacttgcccaagtcacgtagcttgccagcagtagtcctgactgtcaaacccatgtctgtgtggctccaaagtccatgtccttaactatttccctattttctacagataggattatgtttttattggaaaaatgccttgtatatacagctcctcagtccagagtgcaaagttagatagtcatttcatagagttgtatagagtatgcaaaaaatatcacccactagtggttccagtcattaatgatctgtccttttgagatcttttacttcagaggaagatttaggcaagagagcaacatataatagtcagtgatacaaagaagggcatggaacatttggggaacacaggggtttggagggcctgaagcacaggggtggtggtattagaaatgtgggaaatatgggccatgagcctccggacagaatggggtccaggaaggacagcatcacacactgtgctgtgagtttgtgatcctcctgtgggcaacctcagcagtctggttattggcccttttttcttacagcctggaaaactggaccaagtttcgattgatctcagcgaccgaccggcagcctaaaagaacaatgtggttacaagctcatttttgtcaaacacaagcaactcacctcatcatgggtaaggggtgatgaaggggagcaagtctgacttgatctttgtgctcactcttataaaatggtttacatacagaatgaataatgtaattctgtttgcattgggtattattctgtgaacctgagcccaggtcatctctgaacatggccatgtcaaaatgtcagggtaaacatgtaaaaaccctattttagcattttctaaatcaactcttgtgtgcaatagatgtctttgatctttatcttggttctgataaggctcagggatataggaagtatcttttcgggaggaatatgacacacagatagcaaaagagatggggtgagtattccacatgacaattgccttctaaaggaaagttctgtcaaaggaaaagactcttctttagaagaagatattaattaatatgtaaaattatgactgtagctcagattggacataaggattgaagagagtaactccagataagtaaaagaagggagaaagagaagctggcatgatgttatggggctggggagttgtgggcttgagtaggcaatgagaagtccctggtgatgagaaggctgaaagaatgcaataacaggctgcgtaacgtttaactgggagttctttccatatttatgatgtgtgcaccataactttggcaaaatgtattattcacaaaaatatactaatgagagggtcttttcctaaaagtggaagcatagaaaagagttgagtttcatgcctgggttgactggagtggacagaaacagcaggcatgggatatgtcaatagtccgtaaattgaacgaattcaacagaagcaagaattcagagccagaggtgacactccccagagctgacaatgatcttgaggacagctctggtttccactgtgcagagaatagtgcttaatctttgtcttgaaagttgcctgcctgtcctatcttttggacagctaccacatcaggaaagggtctgctagagggaaggactgctgctcctattctttagccatcctgctttaagttccaaatcagggaaaacatgttaacttacctgtaagggccatggaagtgtggaactcatttgttaaaatgttcaaaacttccttaacaccatgttcaccctgctcccgaggcagacagacagagacacaaagagacataaaggaacattctgaccatccactagtataaattctagatgtagtcagagctataatgggaaagatggggattatctgtgaagtgagaattaccttgggaataaaggaaagcacagagacaaagataggggatgaaagctattgaacatttgcaatgggcttcagaagaagcatggagatgcagcttaggtgtaactatcctttaggaatcattttgaaaatgtctaagcttggaaaatgaaccacaggaaagcacagaaatgaatgagaagctctgtatcttcttgctggtttgctttgccactctcaccttgcaggcaaggccccataggattggtctcccaagaaaaatgcacttagctccaagggccagagccttcagcacatcattgccagttcggaccccgccatccaggtagacttcaattttcccctttacagcagccaccacttctgtcaaagcatcaatctgaaaaggagatacacatgggctggagggctttctattttgactctcagacttggtcttcctggcatatgaccaggaaaaccaagctgaggagacgcccttgacaatttcttcccctcccatgcttgaggctgctagcgctgatcaactgcagcggcagtcacattcctgaggccctcctgccttgactttctgctttgactccagtctagcttctctctgactcacttaactgtcttacaagttggaagaactgcttggttattctttccatcctaaaagggacattttccacttataatgtttacttcaactttcttcttttcaaacattttgacttttgattttcttctactctctctgtttctagggtggcacaactagaaaggctctccactgcaaaggcactaagtctttttggcaagacaagtacacttggccatggcctgcatgtctggattgcatcctgacttgggaaactgggttgaacattatttctcatgcaccacttgaccaacttgtccctgacttcctcatggcgtatctgagaaaatgagataggactaaagtacaacacggtaaaactaaagtttgagcctttgacagacaaaataaaaacatcttatcatcttggcctgattttcctaaggaactttgtctcttatgttgcctcttcaattccagggaacaggcaaataggccttgagcacacaaggtgccccaggccgatctatgcttctaggcacctacaagtctgtaaagaggagtgacaaacaggccccttatggatcaaggcggaagatccttggggagggagttctggaacaccctcagggtttttgtctgtgcttctctgagggatggcctgagaagaagagtcaaaactgggccctatgaggccttctgctgccaaaggaatccattagcattctacctgaatgggatactttggctgagactgaacagtataagaaaatagtgaggaaataattttctactttaacttataggtgagggcggggaattgaatatgttttgaacttacatgtaataactagagagaattcacattctaataagaggcattttttatagtcccagcatggtattatttggagtatttttataatgttgtgaaagaggtgggaacttctatgaggaactttgaaatcacctgatttcaaactatagtatctgagtttttggcactcccctagagtctgtgcctgaggtcagtgtcccactccctgcaggttgttgccagtgctataaaaggtaaggattttgagaaaagttcccacctctatgaggtttcatatctaacattgttcttgtacttcctcctaggaccaggggaaaggataagtcagctgttgtccccagaagactctaatgaatgtcctgttctgtcctattaaaaattaactctaaagcctcaccctaaggtaaaattcactccctattttatttcacaattattatcaactccactgcatagtatggctcactagaagagtttgtacaaatgtatttctctttcacaacatcataaaaatattccagctgggcacagtggctcatgcctataattccagcactttgggaggctgaggcgggtgaaccacctgaggtgaggagttcgagaccagcctggccaacatggtgaaatcccatctctactaaaaatgcaaataaccaggcgtggtggccagtgcctgtaatcccagctacttgggaggctaaggcaggagaattgcttgaacctgggaggtggaggttgtagtgagctgagactgcgccattgccctccagcgtgggtgacaagagtgaaactacaaataaaaaaaaataaatccaaataataccatgctgggactataaaaatgtcttttatttggacatgaattctctctcgttactaatagtcaccaaaacagcatggaactggtataaaaataggcacatggaccaatggaacagaatagagaacccagaaataaatccaaatacttacagccaactgatctttggtgaagcaaacaaaaacataaagtagggaaaggatactatatttaacaatgctgctgggataattggctagccacatgtaggacaatgaaactggatcatcatctctcactttatataaaaatcaactcaagatggatcaaggacttaattctaagacctgaaactataaaaattctagaatataacataggaaaaacccttccagatattggcttaggcaaggattttatgaccacgaacccaaaagcaaatacagtaaaaacaaagataaatagctggcacttaattaaactaaggagcttttgtatggcagaggaacagtctgcagagtaaacagacaacccacagagtagaagaaaaccttcaaaatctatacatctgacaaaagactaacaaccagaatctacgaggaactcaaacaaattaacaagaaaaaaaaaaaaaaatctcatcaaaaagtgagctaaggacacgaatagataattctcaaaataaaatatacaaatagccaacaaacatatgaaaaagtgctcaacatcactaatgattagggaaatgcaaatcaaaattasaatgcaatacttccttactgctacaagaatggccataatcaaaaaataatagatgttcatgtggatgcagtgaacagggaacacttctacactgctggtgggaatgtgagctagtacaactaytatggaaaacagtgtggagattccttatagaactaaaagtagaactaccatttgatccagcaatcccactaccaggtatctacccaggggaaaagaagtcattatatgaaaatgatacttgcacgcatgtttatagcagcagaattaacaattgcaaaaatgtggaacccacccaaatgcccatcaatcaatgagtggataaagaaactgtggtgtatatatatatatatatatatatatatatatgatgaaatactactcagccataagaaggaatgaattaatggcattcgcagcaacctggatgagattggagagtgttattctaagtgaagtaattcaggaatggaaaaccaaacatcatatattctcactcataagtgggagctaagctatgaggatgcaaaggcataagagtgacaccatgtactttggggactaagggagaaagggtgtgaagggggtgggaataaaagactacaaatagggtgcagtgtatactgctcaggtgatggttgcaccaaaatctcacaaatcaccactaaagaacttactcatgtagcagacaccacctgttccttaataacctgtggaaataatttttttaaaaaaactcagataaatgatgtttgaacacaatgttttaaaaaaacaaatggcaaactctgacctgtgagctggaagtttgtttttataaataaatagacctggggctaggattaaggtgaggcaagtgaggcagggttatacaagcacagggtcaggtttcacctgaagcaaaaccctcacgagactcacactgatatttgtgctgtctccaagtgaacttgagtttggatgtgaagccaaatggcttgggagaatatcaagttgattagcacaataagataggagaaattctcctctccctggcccctaccttagccaatactcattctctagtggggaagcacaatgggagaattagtcttcctctttgtctactcattactcagttattccaaaagaacaagaccagctaagttgattaatgagagcctgacacctattgtatgatgtattttattagctttctttcaaaagcctatattctactgtttgctgcttgttggtaatgggctcttcattgccttctgctcctatttaggcatagttgggatgacccagggcatgctatgctcttttgctttctctgttttgctaaatactggatggcttgtaggcatcctggcaggggttgggtgagagagctcagtgtgtgctcagcccaaccactttctcctaagtttgcaggtcaataggtgagatgaaaagcaggagacccaaccacttcggttcagctcttaccagagagacacagtgaagggtgacccctgctctccacgtgggcttgcattccactgcctttagcagttagagctggtgcagaggaggaggtgagtggctggctcttaggcttccaagcatcacgtgtcttggaatgtaccaaccagctagtgcaaatttctaattcctggaatttatcttaaagaagtacttgagattgtgctatggattcagtcactgatgtgttgtttaaaatagggaaagattagaggcaatacagatgttctacaatggaggttggttatatagttgtctgttcatactacataccattaaaaataagaggagcatatatactgaaacaaaaagttgctcttaatataatgctaagtaaaagaaaaaaacacaatattatttatacttttcttaaacaccaaaaattgtatttgcattaagaagatgttaacagtgaccaaaatgttgacgttagtgatagtgataaaattagtgttaatttttatcttttgcttatgtatgttttctaatttatctgcagtgaacatgttttatttatataagtgtcaatgaaactgaagaggaaaaaacctcatttctctttcttaaaacaagtcaagcagcaatagaacatttgaaaaaatataactcaatgaaaacaaatcaacaacaaattcccatgtaaagattctttccctgccttactttctctcactttcttgccctcaaacttcatttataatgaacataaatttatgagttaagggaaaaaattatggacttttatagattttagcaaaagacacatcagggtgtttttagagttttgccatgaaacgtgtttactttagaacatctgtctaatcaaattcaacattaattatttattatcttaagtgaactaaagataagttatttaacatcactaaactacagtatccccatttgcaaatcagggataataacacccatcttgcagcattggcatgagacttagagatgctatatgtaaaggttgaaaaaacagcttagcacacagtaggctactaataataattaacagtccttaaaattcacagatacataccaacacatgtggtacagaggagtgaaatatgctcagatttcacagagtcccttgatgtggacacactcacacatacacacacagcactcacaaacacacccttctctgaagtaatcctacttactgaagcaagaacctcatcaagctgcctcccaccatggttggaaacaatgataccctggacattgtgcttcacagctaactctgcatcctcttttgtcaaaatccctttcaggatgatgggcaatcgagttatgctctgaaaccaggagagatcattccagcagagagaagtgctgataggagtcatytggaaataaggtattgcatttccctataggaaataaaaagggaacttagtcctgagctctcacaaggctacttgatgcattccaaagatgagacacatttagagagctgccatttataaactggaaggaggaagaacagggctgggcatggtggctcatgcctgtaatcccagcactttgtggggctgaggcggaaggatcttttgagcctagtagtttgagacaagcatgggcaacacacagagaccctgctgctgctcctctaaaaaaataaatcgtggtgcatgcctgtagtcccagctactcgggaggctgaagtgggaggatcgcttgggctcaggaggtctagactgcagtgagtagtgatggcgccaccacatactagcctggctgacagagtgagaccttgtctcaaaaacaaacaaacaaacaaacaacaaagaaaacaaaaagaaacaggagcaacaaaacccaacaacgtttctagctcctttgtctaacaaactttgtataaaagaatttctacttcaattgcttatcattgaccatgaatcatgttgttgtcagtaattgtgctaggatctggggacacaaagacaaataagacaaagtttctactttaaaaaattcagagtttagtatataagatggataagcaaaagcatttattggtcaatgtgatatgttacggttgaggcatacccaggataagaactaagcaatactaaatcagttattacccaatatttactcttggctcaccatgtacatcaaacatttataaatctcaatgtgcttctggaatttgaataaggattttggagcacctcaaggccaatctgtgattaatgagaactgttgagttacttggcttggtgtcacagytgcccactggttgaaaaggctggctttagtatctctactatagccagggattcccactttatcatggctgtctctctctgaggcacttcttgccatttaattgtaggattttaatggggaaggtcccctttgtagtcacctagttcagagattacaaacaaatgtgctatagcatcctggtgctccacamatgagctctatgtgtgcagagatattgattcctcagtttcaaggcagtaaggtagaacctggcctgtctagactgtctggccagtcactttggtcatgaacatcccctttggagagtcagtttgtctatgtatgccatccaaaattagcattttctgagtgtgtcataaagtagaaaatgttacatgaacttttttagtttactctccagttcgtgcaaaaatmttttccgtggctttcctatttctcagcatccagctctggccagaacacttctggtgacaagttgggcagctccaagggtgagaacatttggtcttatgttgattgtgcttgtctggaaactctagggagcaggaaccatatctgctttttgaaactgctttatccgcagtgtctggcacagagcaggtgttcgataaatgcctgtggaaagaaagaatggaggaaaggagaaaagagggaaggaaatttgcctcttgtaatgcctgtccatcgaatttggtatctttcytacctttttaggtgattgaagatctgttagtgttaagttcctcctcaactggtttcgaatgtcatgtcgcctgttgccacatacaggtgtatccaaagttattaccaaagctttgaaacctagggattctaccctctggatcaactgtttgttcagctgcaggtctggatgcacatagagttggaaccatcggaggccttcgggagctgcaatgacaatgtcttcaaggctacagctggcaaatgtgctggtgatgtagcagataccagccgcttgggcagctgtaaagcaaaggacatgactcaggctggagggcagaggcctctggactgggctgaaaaccttgggagtctgtgtagcctctggccatcttgccccatgaatgcagataaagcttaatttcattctgcttccttgtaagaaagggatggaaggcaatttgatcaggctgagagacctaaacctttttgggttctcctctgtataacctgtcttacaaaccctctactcgataacaaaatatttccagctaaagatgccatgcaatctccagaatcatgttggttgtgttatagccttcagacaggcaactgggcctcttatgaactccttaatgaagcagaagagaattagagagggcagaggatgagggaatgtarttccagtggagaatcctgaacttcatggtggaaaaagcatagcatatgaaattagaagaatgctagttctaccccttctttgctgtgtggcattgagtctctcattttctttatctgtaaaatagggaaaataataatacatgtctttaggattgttgggagactgaataagatactagctatggcagcattctttacattgcaaagtggtrtactgcatagataccagtgctaatgaagttgatggtgatgacgttcatatggctgctgctgactggcagatttcccatttcctactttattcatttcaatgaaatctccaacaggttaatgtcactgtcccactataactcatgggcagagaatttgggctaatcaaaaattaacattttcaatttttcatgtcaacaggagataccccattctttcatcctacccccaaacaacacattcaaccatgatgacttagtaaactagtcacattcatataggatattaatatctcaacctagctagacctggtccctagaccccatcaagatggatgtcacattcagctctagaatccttgaatccatagcttccttcatcatggagtcaaaggaaaagacctcagggaagcgctgagaaattcacaaaaacagatgtgacttagagtgaagattacgaaagagtcccaagagcattttcagccccatctctccttttctatttattattattattattattattggcggtggtggtggtggtggtggtggtggagaatgtgggatgagaattaggttgactgggaaggagatgtaacccaacaataaaatctttgtcaaacaagatgacaaggtcaattgaagagaaggaaaatggaatagttgggcaacagcagcttccagggccttgtgttaggacctaatgtcgtgattctctcctcatcctaaattcagagtctgccattcagccctagccctggcccatcaggggccaaagagggccctagccttggggctgcgttaagcatccctttccctacagatggtgtgagccagaagggccagcacccctgttctgagggatgacttggttarattttagcaccttcttattcatctgtaaacccccttgcactctaactattctttattatggaaaatgaatgttttctcaatcttaggttacacaaacgtagctttaagcattccctttcctgccttccttagtgttaaccagattatgttcctaaggcccttctagagagaatcttggagcctctgccactgctctgagggacacctcctcccggaaaggagcctcgaggtggggatggttcatacctcttgctgtgctcatttccccatcaggccagacaaggcagtggaaccctgtgggtgcgatacaaataggggcactgatctcctccccttggattgtggttctggtgtccacctcagacacatctctcaggtaccgcggacggaggcgaattctgtgccggacaacaaagagatcttctgttggtgagatgattctgcagcagggaggcgttgtctggggtggacycccctgattcctgatacaagtctaaaccagacagggtcctgtggaaccttggtgggttcarttggctgagagctgagtaacctatgttgatccaggaggagacttatctccagaaagccgcttccaacacctcattccccatttcccaaccttctctgaaccactttgtgcataccaagtccacactattcctgctttgctctgtcagaagtctgtgtctttgagtcatgcctcccagactacactgcagcacttggatggtttggttcatcataacaaggactaaaaagaaaagaataggtaggaagaggttccagtctcttttcctctcaggttaggcccaagtctccagaaagtaagaaaaggtcactgaatgagaacaaatcccagggagtgattgaggcttttgtgatagaggctagttagtttgaagatttgacttaaacactgctttagaagaaggtaggagaatttacaaataataaatatgcaaaacacactttttaaataaatgcatacttagcctcaggtgtctaagattttcattgtttatacaatattattatttttgcacataaacttagaaaaattttctgaaaattcttaattgtgcaaatttgagtaaggtagcctcagtcacttcatctgaaataggaataataatccaaatttcctaatagttttgtgaagacagactgaaataaatgatgtaaggtgcctcgtatagtgctaactaagtatgaaaatacagaatatagggctcccttttataccatttttcagttttctcctgacctctgtatcacaggaatcagcaagctttttctataaagggccagagagtaaatatttgaggctttgtgggccatgtaatctttgtcacagttattcaacactgctcttgaagtgcaaaagcagccataaacaatagtaaatggctgagcatggttgtgttaaaataaaactttatttatggacaccaaaatttgaacttcatataatttttatgtattacaaattattcttcttttgactccccaccctcagccattcaaaaatgaaaaaccatcgttagctcatggaccatacaaaaataagtggcgggtcagcctctrcctgtggactgctgttggttgaccgatgctccatctcctactttttcagaccaactcttctcccctgactcaatctcttattatctttgagactccttggatctccatattttctccaaacctgagtgttctctcctgtcttccattttcttctccaagccagagtttaggaactcaggagatctaggcctcccagcaggcccatcctccctgcctagggaactggtcattctgggactcttgttctatcttgtcaggttgcaaagttgctgagatgaaggagaatgactcacttatgctggctataacagaaattccctctttttccatcttcccatcagccctccctcccctgccctaacaaaccaaaacaacaacaaaatcatccacattattaggtcttgagtgatctgtgttttttggaggcagaaaccaggactactactgtccaagttgctctccaccagtgcaccttaacctaacaatagacaggctacagaagaccacaccttttaaatgctgcaatgttgtcatcccgcgtgatgctgtcatctgctccaccttcaataaaatcccgagttgacttagacagctgctytcgcgcatgggcctgaaagtctgtcaracacaccaaggacatttctggaccttccaaggagaaaacaaaaccaaaccaaacccagtgagaacacttcagatgcagaaaaggaaatgaaggggaagctgcagtatgaaattgtttggattcaacattggtctccctgtattcttatsttaacagagttattgctaaagccagtgatccctaagccagaagkcagagagtaatcgtccacccttccattctcccattcccattcccattcccaaatcctgattatttggccttctgagtatttcttatatcttctcctccrctgtacacacaccaccttagacctagttgaggccccaccacttcttaaaagcttattacaaaaaattcttatttttgtatcttgccttcacattcactccacatcttgtcttccatcagcttcctgggatcttcctaaagttcaaggctgatcatgcctgcctcttgtytttcaatgtgcccacrtcatgrcattcccagctttctaggccctggattttcactgcctcaccagcttcatttcttggtgaactgatgctactatctggtagttcccaggaatctcaatgtttgaattgtctggagctgtggattacagagtggggaaaggacaagacaaagtttactttgtaattcttggctgggtcgctgaacatgttgcttaatattattaggaggctcaagggtcaccatctacctttttcctatttttgctaatttgggtacctgagaaacaatgtatgttggctccatttattcccatcttcaatttgagccctataaaygcagagcttggtacttttgatacaacaccctgaaagaggaaagaggacagggcttgggggtaatgaataaatctctccagtagaaacagggcagtagaaacagcagcagagacgctgaagacactagttgctttcagttacagcatgtagagctcctgcatgagaggattccagaaggaaaaacagagaaacctgaagtttctaagctccagccaactcccaggcagttggcagccatgtgaaaattaaccaaaggttttgggtggaaactgaatgkcttttaagtcattatctaaaggaagaagataggccgcagtaactagggcttcaaccaggaatgggttagttcctctaatggacaaaggggacacagaggccagatgagatgtgaggtgctgggaatcttggctggagcagggatggggcagaacttgcttgaggatacctcaagtcaagccaggatctgtcaagccagattctgttgaagtcaaacagagaagtagccttagcacgtacttaagggccaagcaggaagaaattatatgacagacaggaaacagagcccccaggaagtgcattgggctctagatggaggctacgaggagtaatttggagcccagccatagcaccttttatagaaaaagtagtctgccagtgagtgaggagagaacattgaggtatggagttgagtctgacaaattactacaaccatatctaatttagctcattcttactccacccttcaaagggttaataaaccttagtcaaatgaattaatcattgcaagtaccaattatatcacagttgcttatttacaactctgtgtgcataaaagcataaaagaactaatatatgatgcctgggaattttattcttccagagatctgcttgcaatattggaccttggttggtgtctgggaacttggatttcaacagggttcccagtgttccctgataagagtgcctccctgtgtataaactgtttgtataaacaatgtggtttatgatgaacatttgcttctcctctgggactctagaattttggtatgggctaggcagagggtgaccatatgaccagcctccaacatgaaactctgggcattgaatctctactgacctgctcaggtaggtaacattttacatgtgtcatcacatcttgttgctgggggaattaactgcatcccgcatgagtccactggcagaggactcatggaagcttacccctggtttcctccagattttgctgccagagccatttttccctttgctaagtttgctttgcatcctttcagtaataaagcatagcctcgactatttgttcctcctaatgaagaaccaaacctgggacccccaacacactttgtattcccaggcattaggatagtacatggcactgagttgctgcttacaaatgttcattacttgaatttaacattcccctgcctgtcatttatcttcattattggatgagaattctccaccaggtttcaactcctgatatctcaataaatacacatatcctatacattacacactcatagaaaggctgttctacacaattctagcatataaatgccacaaacattatgtctaatccagaagaaatggctcatgctcactcagagtcatgtgtctagaatagtgtcagttatgtgatttgaaagctgcttggacataaagaatcaaccctagcatcttatatataacaaacactattttatctcatttcgatacctcttctaatttttccttagactcttttctatctacagctttttctcagtgtccctgtgaagaagacagagaaggtattagtcttcctactttgcatttaaagagactgaggcctcagaaataaaataacttgtgaaagatcagtgatatggtttggctgtttccccacccaaatatcttcttgaattatagctcctataatccccacatgtcatgggaggggcctggtgggaggtaattgaatcatggggctggattttccagtgctgttcttgtgagagtgaatgagtctcatgagatctgatgggtttatttatttatttattttgagatggagtctcactctgtcgcccaggctggagtgcagttggttctggactcatgtgttctggtagcttctaaagatagacattctctattttcaatttaacgtaaagaacaaaatagttggttctcataaattgcttgctatatttaagagaattttctaggtttaaaaatacaattatgcatttttttctttttataatgtatgtaaagcttagcatgatctcagctcactgtaacttctgtctccccagttcaagcaattcttctgcctcagcctcctgagtagctggaattacaggcatgtgccaccacacccagctcatttttgtatttttagtagaaacggggtttcaccatgttggccaggctggtctcaaactcctgacctcaggtgatccacccaccttggcctcccaaagtgctgggattacagccatgagccaccatgcctggccgagctgatggttttataaagggcagttccctgcatgtgctctcttacctgctgccatttaaaacatgcctttgctcctccttcacctttcaccatgattgtgaggcctccccaaccatgtggaactggaagtccattaagcctgtttttctttataaattatctagtctgaagtatttcttttacagtatgaaaatggactaatacagtaaattggtacctggtagtgggacgctgctataaagatacccgaaaatgtggaagtgactttggaactgaataataggcagaggttggaacagtttggagggcttagaagaagacaggaagatgtgggaaagtttggaacttcctagagacatcttgaatggctttgactaaaattttgatagtaatatggacaatgaagtccaggctgaggtggtctcagatggagatgaggaacttgttggcaactagaatgaaggtgactcttgctatgttttagtaaggagactggcagtattttgcccctcccttagagatctgtggaactttgaacttgagaaagatgatttagagtatctggcagaagaaatttctaagcagcaaagcattcaagaggtgacttgggggctgttaacagcattcagttttatgtattcaaaaatatatggtttaaaattgaaacttatttttaaaaggggagcagagcataataaaagtctggaaaatttgcagcctgatgatgtgatgatagaaaagaaaaaccaattttctgaggagaaattcaagctggctgcagaaatttgcatatgtaacgaggagccaaatgttaattgccaagacaatggggaaaatgattccagggcatatcagacatcttctctgcagaccctcccatcataggactgkaggcctaagatgcagggcaccagggccttgctgctttgtgcagtctcaggactggttgccctgtgttccagccatggctaaaaggggccaaagtacagctcagattgtagcttcagagggtgcaagcctcaaagcttggcagcttccacatggtgttgggcatgtggatgtgcagaagataagaactgagatttgggaagytctgcctagatttcagaggatgtatagaaacacttggatgtccaggcagaaatctgcttaaaggggcagagccctaatggagaacctctgctaggacagtgcagcaggaaaatgtagggttggagccttcacacagagtccccactggggcactgcctagtggagctgtgagaagagggccatcatcctccagactccagaatggtagatccactgacagcttgcactgtgcacgtggaaaagccacagacactcaacattagcctgtggaagcagccagaagagaggctgtaccctgaaaagccacagaggcagagctgcccaagaccatgggaacccacctcttgcatcagtgtgacctggatgtgagatatggagtcaaaaagatcattttggagctttaagatttgactgctctgctggattttagacttgcatggggccgtagcacctttgatttgtctaatttctcccatttggaatggcggtatttacccaatgcctgtatccccattgtatctaggaagtaactaacttgcttttgattttacaggctcataggtagaagggacttgccttgtctcagatgagactttggactgtgaatttttgagttaatgctgaaattagttatgactttgaggaactgttgggaaggcatgattggttttgaaatgtgaggacatgagatttgtgaggggccaggagtggagtgatatggtttggctgtgtccccaaccaaacctcatcttgaattttagctcccataatccccacatgtcataggagggtcctggtgggaggtaattgaatcatgggggagcgggtttcaccatgctgttctcatgatagtgaaaaagtctcatgagatccgatggtcttataaagggcagttcccctgcacacactctcttgcctgccaccatgtaagacttgcctttgctcctcctttgccttctgccataattgtgaggccccttcagctatgtggaactgggagtccattaaacctttttttctttataagttacccagtctcaggtatttcttcatagcactatgaaaatggactaatacaatcaggtagtaagttattatgagagatggttctgaactcatgtgtcctggtagcttctaaagatagacattctcattttcaatttcaggtaaagaacacaatagttggttctcataaatgacttgccatattgaactcgagataattttgtaggttgaaaaatacaattatatatttttaatataatatatgtaaatcttagtagtctattattttggttagaggtttaatataaggtttataattaaagaaaaggataccttccttgttcaaagcttttcctaaatttggaagtgaagaacttagcacaatatatttgtatatactttctttcaatttgatccctaccagccttgaagccaccagaaattaaagggaagattcaagtaatctaatggttttcttgtattcccactttattttgtcttcttgtattcccattttattttgtctccatttcaatgttttttcttttttccttttttattcctactgcycaagaagaagagacagaggagaaaagaataaaatagcaaattgaccaattgccagctattgttctagaaattttagctcattttagctccttgaacctctttaggctttttgtctgataaaacagtgaggtaaaattagcagaccagtgacaaagaggaggaaatmtgagggcaaggacattcaggagtacctgttgctaacaatctgaagttcaaactctcctgactgagggaaggaggaaggaagtagagaagctggcaggcttttcaaggaagacgtggttttctttaatattgcaatctgatttaacaccagacagataaaaagttgtcttcctttgaagattttgtatgattcatatgattcatgttggtgttgctttaggaactcagggttatcacagcttatatttgtatggaaaccccctacacagtctgtgggaaatctcagcgtgaaaattgcagggtaggctgtggagatacaaygggggagaaaagtcagcctctgatgactcactttaaggtacacttgcttggtgctataggatggtgtccttccagaacctctggcctagttctttaggaacttatgccaagtttcccaatggaatgtcagataatatcaaggctacattttacgggcctagtttgagagattagactgttcaaagttggctgaaaatgctgtaatcagtcttcccctcaaggatagtggatacaaagggtatagccatcaccatggcattgtcaacaacagcactgtcaggggagaggctgaagctagaggagaccctgagaatgaaagaggtgatgggagaggagaagggtcccagagctgatggagactaggagagccatgtgcagatggcagtgttgggttcagggaagacatgaatcaatggcactggaaaatgctcctgtgactgaggcagatgagcccccagcatggggaagagagggcagggggaagaatttggatgcccaggaacagcaggtcagccctcagagtaaaaagggaactgagtgtttctaacattgcagtgatctgaggaatcaaggatggcatttgtatgggagtgaggggaaaagaagccagtccagttcagatctggcaaggattaattcctggtgcctgtcagcccagaatcagctctggcttcttccctgagctctcacacattgtgaatcaaggatgcaggagccttctgaaccataatggccctttttttgtttgttttattctgatttatataataatctctcctttttaggctgccactcctcaaccactctcattagcctttttttgtttctactaatgaaaattcccttctcaacctgtaagcatgttctaccatgaggagtatgatgcttgagttcttcagagtggcttctttagtcatgatagggagtgactcatatctttgctttactctaggagctttgtgtgtcacggattgaaagagtttttgagatttgccgtggtggggcatgtttatgttaaggacatgctcactctgaagttattgtgacctaattaggcaattacctaccattgtcctgcctcccacacatcctgcctattgaggattggaagactatgagaataacttgcttgatggagccaagaaggaccctagagagacagagagatgtgcacaagtttggcagcacagctaataaatgaactcaggtcttctgtctctgcatttagggttctttctgaaatacgatatgactcttgaaattgcttctggatagcctggcaatataacttagaattagcttctccttacatgagaattagcttctcagcacagacccaagatttctagagactcaactcatctacactagattttatcattccacctycacctctactccttctgaccctgcttagccatgccagtaaaaggagctccacttgaagttggaatacggaataaacttttgcttcatccagtcagtggagtggtgtgtgtggcagcctgagaggcaggctgcttcaagagagatagctactaacacttatttgaacagtggcaggctacatgtcttcgctccaaktctcagtttcctcatttgagaaaatatacatttttgtgtatttcagcttaatccatgatagatttgaagccacctgaaattaaaagctgagctgaggtccttcaagtactcatattctgtgctttctttgcccataaacacagggagctgtttagatgaggtcatatgaacattctagttcagcatttacttcatggcaataaagtatagaacagggaaccagcacaatatttagacatatttgccaacaacaaacagctgggtgctcaagcctgcctttgctcctcctccccagcctggaggtctttcttttcaagaacttttctggtcccgtggcaccaccttatggtttcagtggataactacttgaccagtcttgtcactattcccttttacaagaggtacggcctgtcacaccagctgtttttcctgttctcagaccaggtaattgaaatccgttttactacacagatgtgcctcttcctcctttctcgatttctccaaactattgagtgcctttctcagggaaatctttctcacrccttcttctcttttcctaatctctcccatctcatttcctttttcatttgcaaaccaaaaataattgtgctatgtagtcccttatgtcaagaagaacaaagtgaaacaattttgaagtcgcattagacctagcaaagaacttcaaaaacctttgaaaataccctcaaaggcatcttaacatttcttacttacatttccactgaattatctcttcctctaattaagcctacttttcttcatcagttgcatatacaagaaatttttaaaaatgatttattacacagttttcttagttttcagttttggttaatgaccagcaatacaataacattgctttacagtaatttgcattgcaaatatgccagatcttctgctattttgtgtatcaagtgggtattttcagtcacctgggaatccaaccgctattttaatagcattcttttgtgggaaaatctgttctgagtttcaaacaaatgccctccaagyagagttttggaacccagccatattgtaaactgtgtgctgtccatagagcgttgaacatagtttagggcatactgggagacattgatccaaatgtttatatagtgttttgaaagataaggactttcttattctttcaaacagtggaataatttgattatgcaaagagccctggaggcagcatgatggttccttaatatgaataataataacgacaataatattgcaaccatttttcaagtactccatgatgtaccatgcactgtgtaaattgctttacatgcatgactgttttaatccttgtggaaatgttcaacacaaatattawcmtccccatttcacgggtgagaaacctgaagttcaagaggttaaaatactttgttcaatattacatatctagtaatgtgtcacgattccagtggcctggctcttaagcactatagaaagaagaaaatgggcacagccaagtgtggtttatggaatgacagagttggcacggaccttagaggattaaaatgtcatggacatatgcaactttgctttcttccctcaaaaaatcataactcaatcagaaagttaaaaaaaatcttaattattcagccaatcactaaaaaataacttcttatgtttaaatctgtcttaacagtctacagagcactcttctatacgttattccatttggtgcttacaacaatccagtgggcaatcagagagtgtatgtatgagccccatgttatagataaaaacattaaagctcggataattcacgtgagtatccaagctaatgcaacagaaatggcaaagcctgacctggaatccttctgacttgtttccaatgtctttgagccagtatggagtgttactggtatgggggagacatttaagtctctgttctgaatggtcagagagttgcataaaatgagcttggtcaattcccacaaaatccaggccattgggaaaggagttctatgtgacactgtgagatcactgcacctgcctcttcatctgctcaacaaggatagaatgtgcaaaacagacatcagaattcacacaaagctccaaaacaggctctgacgtctactctgtccactagtgacttcaggtcttgcaggtgtacctatatctcacagtggcaatcactgggttgtagcaggagagagaggagaaaaggcagagcagttggggatggaagagcccagctatggagtgcagttttttctctctttgccttcctcctggcttctctgtctacggcaactacccagactgtgtttctgaaggccattgctttccaccgatcaactgtgcccaaggaactaatgactgagggagtcagtggagtagagaagacagactatattataagctttggcacttggcaaacataggctgaaatctcagctctactactggctcaccacggttctgtgcaaaatttatttgttaaaggagaatattaacatccatcccatagggctgccatgaggactaagcagtatggcccctttgaaatttctagaacagtgccttgtatagactagattgttaataaaggcagctccatgttcattattcctcctgttgatgacatgtgtgatttcatctgaggctctggaagtggaaagctgcttcaggatttgagtatttctgtcatagtataatttaaaccctctgtcagatttactcattagtttatccaagaaggtttattgacacacactctcagccagggtggcggaggcatatactgctccccacatgcttaacatttcgctgttgcttaaatacaggcatggctctgtgactmgttcttctggccaatggcctgggagtgggaatagcaggtgtgaattctaggccaaggattgaagagctggtatgtgaccctccagctttgtttcctcctctacagcgatcctccatcctcaagaaggcaaagctgtaagagaaaggccacttggattcccaaaacgccatttggaaaagggtagccctggagatcagctgatattgtgtaaggaagaaataaatatttatgtgttatctcactaagttgttaaggtttattctttactataacatagcctgatttaacataatatatcaaagtattatgctaaacactagagatatggggggggacctttatcacatcagtttctgctctcaagaagcttacagtcgaagaagacagactttcatagctcatcatttgatagctgatacgatttagagtacaacaggagtccctttgaggggagagttacctgggaatttggcaatattcccattacctctcaaatgatataccacaagtgatgttccactcaatctattctagacaagctccaattctcatctatctttaaattaggttattactgtctatctcatagggatcttgtgagaattgaaggatcttgtaaaatgcagaatatagtagtagttaagaataaaagtttgcggattttgcttcctgctaatggacgctttattctgttccattgatctgttatctatctttataccagtacctccctgtcttcattagcgttcttggcagttctccgcaggttgatctgtagattcaacttaacacaatcagaggctcttcattagtgggactttgtaacccatttgttccaaataagcttattgctcaaaggaactacattgtttgagacacattaacttctttacttttttaggagcatagccatgtcactgttttcttttgcttgtggccgggaagcagtggtcagaatactaaatatatccctgaaggcaatagcaataccttttaggttttcagaacgctgtcaagtgaaaacattttaacccatttttcctcctatggacacccacgaatattccaccatacaattctaagactcaacttcctagacttaaccttctctgtctgtatcctttttgaaaccaaatcttcctttgcccatgccctctgagttccctaacacctgtctccctaggaccatctttgccaaggtccttgccttgcaaactcatagttggcttccacgatatcttccattcccatcctatctggcacttcatcacccttctcagttccaagcacacagaacacactcaatgacaaaccttattctaatgtcttccagtcctcagggaaagaagtgtttagacgcagccactcaaagcctggctcactgccggaggtgttaggaaacacaccacatcactacccacagttcaggctaaagaagaggctgaagtctcaaagttaatcttttaatgaaaacatccagcttagcagtaaataagcaactaggccagagcaaggttgactttgaaagaattttgctgactttgcaaatttacttcaaaattaagtgaagtttattacaaaattaaacttcaaagtgaagttgtaatttcctacctgaaatcacccattccctacctctaaattcaaacttgatgttgtcctctgctcatcacagattgttagaggtagggagtggatgatttcaggtaggaaattacaaaagtccccgggttggaggaggggctttttgtggtgatggggttggggtgggrgaagagcaagcacagcctgggagcccatgggcaggacagcagtggggacccaggccaggacggtccgagctttggggattttggagggtgcatagtgtagagccctccctgcccacagaactgttctggggaagtaattatgtctagattaatatgggagtcagggagaaccagtgaaatttttgagtggaaaattattcaggaatgtagaagaaatgctaggaaaagcaaacttaaaagtacatggaaaaatagaattaatttctccagaagagttctgtaggggtcccagaaaggtcactaatttgtccaggtctgttcgtctccactcctcccccagctcttgccactgctccttagtattgccacagctcacgtgtgtgatgcgcttacgacgtgccagacacactacacgcattacttcatttgatcttcacggaaggtcaatcttttcaagattgtctctttttcagaagagaaaatgagattaacgaacatgcccaaagcctttcagcagtaaagagcagaattgggatttgaacctagcctgtagccaacacacggagcagaggaggccraaatcctgagctgtaccgatgaccatagcagtggggtttgcctttcctttagaacctgtagttagagagcaaaatgatgaatttaccactgacttgtcataccatctccactcaaggctcattggctatttatttggagggtaatccctacctgctatctagccactagaggacagtattacctcaaaaatgctttcaaaagtagccaaaatctgggttctggaaatttcttttccatagcaattttcacaatctccataatcagcctctaggccatgtcctcggtcagctctcacaacacctggcctgctcacagtcccctgatccagaccctccsttgctgttttccagactccgactctgtctctcccttccagaaggaagcctggtgatgagcacacactggaacwtggtgctcaagctccaaactgcagccactcactcactaacatccacatgttacttaaattctctgtgcctcagtttcctcataatacctcccacactgtaatgagaagtaagtgagttaatacttaaaagatgctggcagtagatagaaagaacagtagagcttctcatgagagattctcaagtttgaaataatgaccttcttggagaccttttaaatctgatgattgcwctgagttaaagaacatcatctctacaaggtaacacactctaatatcagcctctaatgtttgcacctaagtgaactaatctcaaataggggatatagggccacaggcagagctatttgaggcagcatttttgcagcacctcttgaattccagagaatgggtccatggataagacagaccagctttggacccaccagcaggcttggagaatgtttcaggatgaggttatgaaaagatattggttttattcaggtggtcatagggtacccattgagcaatatgcctgcttattttggatgaagagaaatgtcgggtcattcttgagctgtcatgaccyagtctcttagaaagcaaatgtagtttcacagtagaatagaatgccaaaattcttyttaatggaggggattaaaaacatgctaagtcctcctgatcactgtggtcctgtcctaatccagccatctatttttcctgaggtaattctggaagtcaggatgagcccaggactttgcagtctgtgctcaagcccatcagggttaaagatgaacactttggtgctgtggtcaggttaatattaggttggtgcaaaagtaaccgtggttttgctattgaaagtaattaatgcaaacttgggtcattgcaaackgaagccaaaccagtcatagatggctaagtcaaactaaagacagtttgcgtatttctgcagccaccaagccccttataggctgtgaacctctttgtaatggctacccggtggatgggggcagctctgcagagtcagttactggaagagatgggaagaaaacctgaaagagagcctgctgaagaccttagtccaaggccaatgacttctgtcatagggctgcattgtttgtgttcgctttatagggtctaaagtaggaaggaagtgtgtccctctagctgctgagcttgctacatagatcagatctgactggaggaagcggggtttctggatgtgaagatgagttaggtagctagagctgggattgtacaccttcccaagatcatggagaaagtcagttgctgggcacaggaaaaacaatcaggatttcagaatctgctgggtatcyggggttgaggacatgggtgcctatgtgtgaaatgctgtgggatccactgtcaacagcctgttgatgtgagagtccctggcatcttggagacagtgtgtattcttcaaggcatttatgttgatccaggatcaaacacaacttactgtgagttaggtggcttcagcaggagagaaagtttcttctactcagaaagcaacaatgtgctccctaaagtcacctaatattgtaacatcctctgtgctcagacactcagcaccctgtgccgagcaatgataaggcatgtaaacggcctagcattgcccttagtaccaataaatgctcaagaaatggttgcattattttcaataatagtaattaataacacttacagagcatttactatgtgccaagcagtgtattaagggtttagcagttcttcactcattaggtggggatcatttttatctctgttttacagatatggaggtggaggccaggcattccggaattcaaagccaggcattctggccccagagtccacatttaactattgtgcttttaattaatactgcaaagagttgccaataggagaccagaggagggcaagatggcttctggctagggtgaccagggaacactgccagaatgacagatatttcwgctggccctttcacataaattgaactatattttcttctactagccctagtccttgggtctgaaactgagcccacaggtcctgctgttacatgaactggggtatgggtatatagccaaggcctcaggcctgctgaaccaagagtttattcagcagggagtgggaagccagtagttaagctggtaaggaactcttcaagactctctgagtcttcaagaaagttctaacagcccactgggggacttttgcctctgcctacatcaaaacacattttttaaaaagcttctgctttgtacttgctgttccttcattctggaacatactaatcattcctcatccttaggactcagttgatgtgtttctccatccatgaaaccttcctcagtgccactgggcagagctggctgtgtgtgtgtgtgtgtgtgtgtgtgtgtgtgtgagagagagagagagagagagagagagagagggagaaacttgtcacacggtattgcggcttgtcattacagtgtggctttttcaggactttgagttccttgaggccaggagccatgttgtattcattcttgaatcccactgcccggcccagagcctggtacatagtaggtgcatgatgattgtttattgtggaattagagaacagattttaaaacttgaattctcaaagaaggaggggcaggatgcagtcagcattactcattcccatctctgcccagtctcaccctgctctctctgctttctaccatggtctcctctggaagggtatggccaacttaatgcaaaggtcagggcatctttggttcttggactgatgtttacatttttgaactctcaaggacgttgacatatccagcagctgaactccaagtgagcacaccagcttatgttggtacaatcagcttcactgggggtagctttattatattataaaagtctagtgagaccytcagtcccttcctcatatgggcaccactgactcccatttagagcctaatatggtttagctgtgtcctcacccaaatctcaacttgaattgtatctcccagaattcccaacaacccaaggttgcattaattacttttaatggcaaaaccactgttacttttgcaccaayctaatattaacctattgtgggagggacccatggggaggtaattgaatcatggggccagtctttcctgtgctattctcatgatagtcaataagtctcatgagatctgatggatttatcagaggtttctgcttttgcttcttcctcattttctcttgctgcccgcatgtaagaagaagtgccttttgcctcccgccatgatcctgaggactccccagccatgtggaactgtaagtccaattaaacctcttttcttcccagtctcggatatgactttatcaacagcatgaaaatagactaatacaataaataggtgccagtagagtggagcattattgaaaagatacccaaacatctggaagcgactttggaactgggtaacaggcagagattggaacagtttggagggctcagaagaagacaggaaaatgtgggaacttcctagagacttgttgaatagctttacccaaaatgctgatagcaatatggacaataaggtccaggctgaggtggtctcaggtggagatgaggaacttgttgggaactcaagtaaaggtgactgttgttatgttttaacagagagacgagtggcattttgcccctgccctagagatttgtggaactttgaaattgagagagatgatttagggtatcttgtggaagaaatttctaagcagcaaagcgttcaaaaggtgacttgggtattgttaaaaacatttcatttttaaatggaaacagagcataaacgttcagaaaacttgcagcctgataatgcaggagaaaaaagaattttttttttgaggagaaattcaagcccgctgcagaaatttgcataagtatcaaggagcctaatgttaatccccaagaccacaggaaaatgtctccaggccgtcagagaccttcacggcagcctctcccatcagaggcccgaaagcccaggaggaaaaagtggttgcatgagtggggtccagggtccccatgctgtgtgcagcctgcggacttggtgacctgtgtcacagctgctccagctgtggctgaaagaggccaaagtacagctcaggctgtggcttcagaagatggaagaaagccccaagccttggcagcctgcgggtgcacggaagtcaagaattgaggtctggaaacctccacgtagatatcagatgtatagaaatgcctggatgcccaggcaaatgtttgctgcaggggtagcatttaaggcttgaagcataaaagaaagaaatagaagagaaggcaggagtggaaacagaacatagttatgatcttccagtagctgaaatcatcttaggtttcatttttttaaattagaatataattcacacactgtaaaacacatccattttaagtgtacagctcttcaagtttctgcaagacaggcatcaagttaccaccacattcaagataattgaacattttcatcattacagaacgtttccttgtcttttcccagtcaatgctgtttcacccacagaggtagtcactgttctgactttttgcatcatcacatagaatttcaaattgttgctctggaatttcaaattattggaatcaattaaatgtttatttatgactctttttgttcaacatgctcttttgagtcaactgtgttttgcttgcatgagtatttcactgtttttttccattgctcagcattgttctattgtatgaatttaatccacatttgttttatccattcacctgttggtgggcattctaatggtttccagtttggggggctattatgaataaaaccactgtgaatattcttacacaattttttgtgactatattttatttctccgagataaatgcttcatagtaaagttgatgagtaacaaggcaggtgtatttttaactataagaaaaagtagtcccattttacatttctacctttaaagtatacaagttctagttattttacttcacttaggcttcattctaatagcgcatagtcactaattagagagaacatataaccataatactggtttctacaaacctgtttcacagggtcttctgcttctcaggagatgcttcacccttgaatgatcctgataggagaagggttttccactcactgggaccttcagtccagcatgcacatttgggaagattgttcaaagagcaatgagcgaggaaggcagaacagctcagcccactatgcagggtcaaaaccaacaagaaatttgatgcagatgatagagccacatcaccatcgtatccaggaatggctttgtaacaactcactattccacccctgaaagtaatcagagaatttatttacaatctgttagctaattgttcccatactgagcacagatcttaactaaatgaccttaactaagtgacatttaaatttctgctctctgatatgaaagttaccatgctcatatttgggtagtagggtttaatttaatttgcctaagattgcagctgatttctgagatcccaaaaacaaatttgatgcacatatcacaagatattatgtaaatgctgagaagacagggactttccaggcagaagagggatgatgcacatcagctgtacagcatccagcaagttgcatccctgccgctggcgtcaggggactcaaagccaaagtgagaacagtaattcctgtttctagccacctactgcctaggatgggggtgagagtcaaatatgaaacagttgcattcacatcctaccaagagcttgaccaaatctgggtttaactttcaaatctgggtttaactttccaaatctgggttttcatcctcatgaaataaagataacagtatgtgccttacagagttgttataggaattaggtagtgtagataaagcaccatcacagtgggtgcacaataaacaaaagcctaaatattaagtaggcttgttgtctgagttatacaagggtgccatttaccaaacacatattcactcagctgacaaccagtctttcgtaagtgcctactctgaaagaggtacattgtttattctgttgataaatctcacacagtgacagcaacactacctggactgtgatttgtaacccaagtttcagcctcccaaatgttcctgatcctcttgtcatatggggccaccttctcttcagtattaaaaagcaaactggctctagctcccatatcacatagaatttgaaattcctattcctccctttccatatttccatggattctcagaggatggacacttcttttagatacttcataagttccagcttctgctgaattattgatctctgtttatgtcttgcctcctgtagctgcattcttttattcattctccatggacccaaatgtaaaacatatttcctttcctcattgattaaggttatttccttttatctcttatcacatacaaataatcagcctggtctattgttatttatctgaatcaaggttttattctagtgtccagtatttctgctgtttcattttcctgcacttcttgtacagagtgtcttctgatattattattattattttcagacagggttttactctatcacccaggctggagtacagaggcaccatctcagcttactgcagccttgacctctcaggctcaacagatcctcccacttcagcctcctgactagctggggctacaggcgcgcgccaccacatccgggtaatttttttttttttttttggtagagatggggccccactttgctgtccagccttggttcaaaactcctaggttcaaatggtcctcctgtctcagcctcctaaagttctgggattacaggtatggtgttattattatttttttaattcaaactattattttaagtaggtgcaagcatgtgacccaattatgtcctctggtctgtttatgtgtgaatatatacatattaagttgcatatttttatcacagagtactatgttttcacctgtctattacagttaggatagtatattgtttgtttttttgagacacagtcatactctgtcaccagggtggagtgccatggcatgatctcagctcactgcaatctctgcctcccaggttcaagggattctcctgcctcagcctcccgagtagctgagattacaggtgcacgccaccacacccagctaatttttgtatttttaatagagacagggtttcaccatgttggccaggatggtctcaatctctgacctcgtgatctgcccaccttggcctcccaaagtgctggaattataggcgtgagccaccacgcctggcctattgatttttataataatgtgcagaggtaggttaaactatgaatttaatcttaggatggtaaaggggcaacaattacacctgtattataaaaagaactgttggtctgatgatgtcgggaacctctgtgaagggtgttgtacgggtgaactggagaaacagctttacattcctatggcttctctttgtgccatgtgcactcagcagaaaccatgctttgcatacccatacgatcattctgtttttcactttcagtacagtattcaataaattacatgagacattcaaccctttattataaaatagctactattagagaataagcaatgcggctggaccacacttattccaaaaaatatgcaaggtgcttagggagagaacctgtcagcatagttagagtgggagcacctcattcaaatatcacatgcatagtgtcatttaaccttcagaacaacatcttgtggtaggtgctatgggttttacagctgaggaagcaggaggccagaaaggataagaagctcactcaagatcatgcagccaggaaggtgccagcctcagttttcactgagattctagcacttttggcctagtgttcaaattcaacgaaattaaacacattctaaacattctcatacacttgtttctagtacctcaatagacaaatgattgggaaagaagataataaaactgagattataatatgcattgttttatataactccttgaataccttaattttaatacaataactagttctcccaccacgaggttttaaacgttaggagcagaggatggttttgagccatcagtctctgagttagggccccagcacttcccaggcaccattctgcagcatggctacttatcaaataatagtgatgatgataattaaataataatataccaacttttagcagtcttataccctaatacaaaagattcagctgtggcctctacctactgagagcagaactactatcagtgtaatagccttctgcttcaaagaggaggatgcttacagccttgttgtttatgtggaagcagaagaacctggagcatcctaaggtgagctattcattcagtgagctcatactgggtgcctcttgtgtgccaggcactcttgcaggtatcgtctacactcttggcactatagcactcagtgattcctcagcacctcctgggaatgtcaaactcactaacttgacatttaggattcttcaacatctagccccggcttgcctgtaggggctgccacacatgtccctgcatgcacagttctggatgattcagcatcattggctgcctgcatggacactcctcactgcttcctggaatccctccctaagccatgcactcaaacatctctgaaagcgggggccattcttccgtcaaggattacatgtacaaagctctctcatatgcagaattcttctatggtacttagttcttctggctttggcaaagcctctgggaaaccaaatgtagaaaagttgtgcaaagtctgttgaaactgtcacaaacaacatgagttgctacaaactctaggagcagctaacatcaacaagaatttagtaagtactagtttggaaaattaataattcagcaaatgaatgattttacaaaactgatttttagctaccttatttttagccaattgggttttgtaaatttgcttttagcttccccattcctaacacttcaatcttcctaccccccctaaaatgtcactgctcattagtgacccatcttgccaggagacttcttggatgttggggacccaaagcctcatataataacagagtatttgtttggctgaggtctgcattcctatgattccttagaaacttggaccatatagaaaaggttgcagccactgtcagcagccaatataattctctctgctactcactagctaggtgacccttgtaagccaccagctcctctgagccttgatttcttcatttgtaataggagaataatactgtgtatatttgaagggctcttatgaagattcaataggataatgtgtgtggatatcctaaggcagtgcttggtatatagatgcatttccgggttggctttcagctcctccctactgagacttcacaccccattggctcttcagctgcgtgaggcctcaggctctcagtcttccctgtgtgttttattccttctccccagcaaagcctttctgacccagatcccaccttctcacagctctgttcctagaactgatgaaataattcaatctaaggtgaggtgaaattcaatagacattgctatcatgtgttattttgttagacactataggttgcatacaccaaatttatcccccaatccccatccttctccaacttcttccttggtagtagaaccctgaattttttttttttttttaagatggagtcttgctctgtcgcccaggctggagtgcagtagtgcgatctgagctcactgcaacctctgcctcccaggtttgagcgattctactgcttcagcctccccagtaactgggactagaggcatgtgccaccactcccagataattttttgtatttttagtagggtttcactgtgttagccaggatggtctcgatctcctgacctcgtgatccgcccacctcggcctcccaaagtgctgggattacaggcatgagccaccacacccggccagaacctgattttttttcaggtattcaccttcttccactgaaccatgtgtttggaaaagttgatcccattactcaagtgcctgcttagaaaagttgatcccattactcaagggtaaaaactgattagtcttcatcatgggaagcctatttctatgccagtgcctggttaagggatgggcatggtactctgttccaccaatgaatacaaggggatgtctgcctgggagcttctgagaaagatttccttgttcctacctacaaagggccatccctagagactgccatgtctgcaggtaacagcaggctcatgactgtgaggagggttcactggggttgggagtttaaaaagtaaagtagaggttcaaaagaaagtcttcaaagactttcctccccatctaattaggaataaatagtaacttctcttaggagcaaaatttattcaaagacctgtgctaacattcttaaatatctgctagctgtaacaaagaaatcaatgtactttatgttcttagctcccacaatttagcctaaatatttaccctggcatgcttatactggtccaagcaagcattaggtcatacctgttcctattccttatttgaaggtgtttttacctttctcagcattccacaagttacttcctccttcctttgttatcctctgcctttgcctcttttgaaaagttctaagttgctagccgatcaggacaaatacagaatgtgaggtccccttccagacaacagacaccggacacagcagtagcgtggacgcgtaaagttataaatgaccctgtctcctttgttcagtgtactcttgtggcaaaactgctggcgagtgtaccctttctgcagaaagtaaaaatggccttgctgaggta

SEQ ID NO: 94442 - DNA, 17073 bp, Homo sapiens
  misc_feature (1)...(17073): n = A,T,C or G
ttgagcccaggagtttgaggctgcagtgagctatgatggcactactgcaacccagcctcagtgacagagggagaccctgtttctaataaaataaatcaaaaccctgttgaaggttcctcaaaaaattaaatatagaattactatgtgatccagcaattctacttctgggtacatatccaaaagaattgaaagcagggactttaacagatatttgtatacccatgttcatagcagcatactcacaatagccaaacggtggaaagaacccaaatgtccatcagtgaatgaatggataaacaaaatgtggaagatacatacaacagaatgttattcagccttaaaaaggaatgaaatgggccaggcgtggtggctcaggcctgtaatcccagcactttgggaggccgaggagggtagatcacctgaggtcagaagttcaagaccagcctggtcaacatggtggaaccccatctctactaaaaatacaaaaattagctgggtgtcctggtacgcgcctgtagtcccagctacttgggaggctgaggcaggagaatcacttgatcccaggagacggaggtttcagtgagctgagaccgcgccactgcactccagcctggggggacagagcaagactccaaaagttctggaaatggataatggtgatagttgtacaacaatgtaatgtacttaatgtcactgacttgtacacttaaaaatggttaaaatgggcttgttccagcagctcatgcgtgtaattctagcgctttgagaggccaaggcaggatgatcacttgaggccagagttcgagaccagtctgggcaacatagcaagaccctgtctctaaaaaaaaaaaaaaaaaaaaaggttaaaatgaggccatgcatgcctacaatcccagcactttgggaagatgaggtggtagggtcacttgtttgggaagaggaggtgggaggatcctttgaacccaggagttcaaggctgcaatgaaccatcatggtgccattgcactccagcctgggtgacagagcaagacctagtctctaaaaaataagagttaaggccagacacggtggctcatgcctctagtcccagcactttgggaggctgaagcaggcagattacaaggtcaggagtttgagaccagcctggccaacatggtgaaacctcgtctttactaaaaatacaaaaatcagctggccgtggtggcatgtgactgtaatcccagctactcaagaggctgaggcaggtgaatcactggaacccgggagccagaagttgcagtgagccgagatcagaccactgcactccagcctgggcgacagagcaagactctgtcttgaaaaaaaaaaaagaattaaaaaaagaaacatggccgagtgtagtggctcttgcctataatcccaacactcagggaggccaaggtgggaggattgcttaagcccaggagttcgagaccaggcaacatagggagaccccatctgtacaaataatctaaaaagttagccaggtgtggtggtgcatgcctgtggtcccaggtgctcgggaggctgaggtgggagaactgtctaagcctgggaggttgaggctgcagtgagctatgatcgcaccactgcactccagcctgggtaacacagtgagacaccccgtcttaaaaaacaaacaagcaaataaacaaatactatgcataaaacctcaaggctcaagaaacaacagtttgaaatagttagatgtgtgttttttttaattttcatgtcttatcttttctgcttttttttttttttttaagggatgaggtcttgctctgttgcccaagctggtatcgaattcctcctgggctcaagcaatctcctgcctaggcctcccccctaacagctggaactacaggcatctaccactgcattcagctactgggggagtgtttgactagtctttttaaaaaatatgttaatatcttggtaaaaagtatatttatactgttctctaacctgctttttttcatcagtttcatggaagaatgctcatcatatattcttctgctttataactaaactgctttcatttatgacatcacaattaaactggtaaaaccaaatttatattgctaacttgtttctaattttttctctattaaaatgatatgattagcatccttgtagccaaatatttacacatatttatgaagttatacttaaaacaaattcctagacgtggaactgtgagtcaaagagaagggatcttttaaatatttttgcatagattgccatgaaaaggtcataccagtttatatatccaccaatatgagtttcttttccaaatcttcttcaacatcctgtgagagacagttaaacatagttgttcagagcccagccttgagaatcagatttcaaacatatgaaccctctccctttttcttttctttttcttttttttctttcttttttttttttttttttttgcccaggctggagtgcagtggcgccatcttggctcactgcaagcactgcctccagggttcacgccattctcctgccccagcctcccgagtagctgggactacaggcgcctgccaccacgcccggcgaattttttgtatttttggtttttttttagtagagacggagtttcactgtgttagccaggatggtgttgatctgctgacctcgtgatccacccgcctcggcctcccaaagtgctgggattacaggcgcgagccaccgcgcctggcccctttttcttgttagagacagggtcttatccaggttggtctgaaactcctggccttaagaaaccctgccacctcagcctccaagtaaactgggattataggcgtgagccacctcacccaacttccacttcccagctgtatgatcttcagaaaatcagttaaattctctgggccttaatttactactacggttcttgtaagtattaacaattagctactattatttaccttctttagttcctgagacttctatgcacagaatatacttgatgtgtgccacagaacctatacaaaggtaattacaactaacagggagttgtatgataatgacatgggacatgggacatgagagcatttggaaagagataaaaaggcttaccttgaggacagccttattaggagcagaggcaaacacaggttttgtgagtttgaagcttacgcatttataggtttctctaattaccaagataggaaattatgaaatcaggtacaagggcttgggaggggcctaaagcttaagtttgatgaaaaaaaaaaaccacctctggttggaaccaatagcctatgaaaaagtagaaaaaagcccaatgcatggggagcgccggtagtcccttgaggtgtttgagaggctgaggcaggaagatggctttagcccaggagtttgaggcttgtaagtgcgcagtgatggtaaaccgccgctgtactccagactggcaacgtagtgagaccctgtctctttaaaaaaaaaaaaaaaaaaaaaaaaagatgagaggtaacacttgcctgactgggacaaaaatgagaaaccagtataagaaaataataactattggccgggcgcggtggctcatcgcctgtaaatcccagcactttgggaggccgaggcgggcggatcacaaagtcaggagttcgagaaattaataactattacctcatttggctatttttacacctgtaaggaataaagctcagaggtcacacagctagtaagaagccagcacccttcgatgtgggagtgatgtggaggataggcatatacagagaacacgaaagcaaaacaccatggtgcagattttgaaagaaaagccctaagattagtaatgagtgtgaattattcaacaaagtgatcaaaaccaactccagtcctgcattcctcttcgccatcaggagtttggagcctggagactgctagctgcctggttgttgttgtttttttttttttctgagacggactttcgctctgtcgcccaggctgtagtgcagtggcatgatcttggccaactgcaagctccaccccccgggatcacgccattctcctgcctcagcctcccgagtagccgggacgaaccagtcctggcccagcccattccgcgagccagcaagcttctgaaaagcaaacctaggaagttgctttccaacataaagtggaggtttcaacacaggagactttaagcaagttccagtgtgtctatatttggtctggctgatcggctggactctggccttccccgctcacattagcagacagctctgccctagtgggcgtttagcctgcgacggcagcccgagaggaagagttgggcagagttgcaggggtctccacagctgaggcagtttggccggattatttgggttcctgctcggatggcggcgacgctgatcctggagcccgcgggccgctgctgctgggacgaaccggtgcgaatcgccgtgcgcggcctagccccggagcagccggtcacgctgcgcgcgtccctgcgcgacgagaagggcgcgcttttccaggcccacgcgcgctaccgcgccgacacccttggcgagctggacctggagcgcgcgcccgcgctgggcggcagcttcgcggggcttgagcccatggggctgctctgggccttggagcccgagaaacccttggtgcggctggtgaagcgcgacgtgcgaacgcccttggccgtggagctggaggtgctggatggccacgaccccgaccccgggcggctgctgtgccgggtgcggcacgagcgctacttcctcccgcccggggtgcggcgcgagccggtgcgcgcgggccgggtgcgaggcacgctcttcctgccgccaggtgactcacctccgctaattgttcccctctgcccatccctgttcctgcgctttccactgtgtgtgtgtgtgtgtccccttcgccccgccccgctcttttcgcttgtgtgtgtgtccctcctcccgccccaccaccaccaccccgggctatgttgcccaggtaggtcttgaactcctggacccaagctatcctcccgcctctgcctccccaagagctaggattgcagggtgagccactgcgcccggccctttgaggggagttacacttatttttttatttttattttttttcgtccctgcgcttttcatacggagaaaggatgtagcttccaacattccggaggttagtgtaaggagacaggaatggaatggaaagttggttggggaattgcccctgccgctccaaaactgagaggtccctcaaacctagtgctcagttaaaagacattgtaagggctgggcgcgctggctcacgcctgtaatcccagcactttgagaagccgaggcgggcggatcacgacgtcaggagatcaaggccatcctggctaacacggtgaaaactcgtctctactaaaaatacaaaarattagccgggcgtggtagcgggcgcctgtcgtcccagctactcgggacgctgaggcagaagaatggcatgaacccaggaggcggagtttgcagtgagccaagatcgtgccacgcactccagcctgggcaatagagtgagactccgtctcaaaaaaaaaaaaaaaaaaaggcattgtaaggaaagagaaaagacacataatattaaaaacaaacaaaacaaaacaaaaaaaacaggccggacgcggtggctaacacctgtaatcctagcactttgggaggccgaggcaggcggatcaagagttcgagaccagcctggccaacatggtgaaaccccgtctctactaaaaatacaaaaattagccaggtgaggtggtgcacacctgtagtcccacctactcgggagtctgaggcaggagaatcgctggaaccctggaggcagaggttgcagtgagccgagatcacgccattgtactccagcctgggggacaagagtgaaactccatctaaaacaaaaacaaaaacaaaaaacaaacaacaacaacaaaaaattttcaagtagtttcaatgttcttatttatgtatggaccaggaagtcacttttttttttaataaaaagaattccaactggttttctcactgtatttccatggcagctaggaggtgccaggtggctgggcctgtgacagtgcagaggttttggtgcctgcccgcccaccattgctccagctgcagctgctgccccctgcagggcctgttcgttcstgctgcctagctccctgctggctggctatgatctccgtcctgttaccattccaggagagcagccacctccctgtgcatggcaggaccaggtactgattgtggcctctcctcttggcctcgaatggtatccttgtcatcagtgagcaagtccccaaagaccacggtcttgtccattgtcaggataattcactccacaagctgggactccaggtgctgctctacccagcggtgcttctcacccacacagtggtcatactttggcaggggctggtgcagtgtgaagacctcggtgttttgcatgtgcttcatctcttgcaaggccctctggggttgggcttcaagactagggaaaagcctagggcttcacacccatgggccactttatccaccaggtccggcagcagggtgaggtactgcttccagaccaggaagctgcggtgctgctgcagtgtcacatgcagctccctgagaagcggcggctgaagccccacaggatgccgtctggaagctgccagcacgcggtccctgtccatcagcacacgcgtgggctgtgctcatcgctgctggggcactggggtttctcgggatcctaggggtatggggcccagaaatgttctttaaaagtttctcatttttgcaacttttctttcaattcacacagtatgttaaggtttatgtaaattagcatttacaataggaaagcctcttcctgtcaaatggaaatttgaggttactggatacttttatattacataaagagcaatcagccagtgtagaaatgatgcttatccttattaataatcaaagaaatgcaaaataaaacaacagagtacatttcacaccctcagaagtggcccacttttagaagctagcattatcaattgctgaccagtatgtggaggaaatgaaactcactgctagaaggagtcaacatattcatctgctctgggcaacaatttgtcttaacttacaaagttaaatatgttattctacttgtacatgtgcaccaggaggcatattccttataagaggaaagccattgcagatgagcagtctggattaatttaaaaaaagagcaaagtcaactggaaacagtccaaatgtccatcaacaatagaacagattaataaattgaggtatatttccagcagtcaaagtgattgaactacagctagaagaatcaacatctatcaagatatacaaaagaaaagaaaaaaataaaaaagaatcaacatggatgaatctccaaaccactgttgagtgaaacagtcaaacactaggagaacacattcagtatcattccatttagatacagttcaaaaaataggcaaaataaaatattgtttaaggtacataatctaagtggtaatactatgaagaaaaccaagagtgatacacagaaagtccaggatactggaaagagaggaaagggcacaggggtctgtgggacgttgatggtttgcgggtatcagcactgaactatgtcttaaaagtgttgcctgtaaggtgtttgcattctttttttttttttttttttgagacagtgtctcgctctttcgcccaggctggagtagtggcacaatcttggctcactgcaacctccaactcccgggttcaagcgattctcctccctcagcctcccgagtagctgggattacaggtggccgccaccacacccagctaatttttgtatttttagtacagatggggtttcaccatgttggccaggctggtctcgaactcctgacctcaggtgatccacccgtctcagcctcccaaagtgctgggattannnnnnnnnnnnnnnnnnnnnnnnnnnnnnnnnnnnnnnnnnnnnnnnnnnnnnnnnnnnnnnnnnnnnnnnnnnnnnnnnnnnnnnnnnnnnnnnnnnnnnnnnnnnnnnnnnnnnnnnnnnnnnnnnnnnnnnnnnnnnnnnnnnnnnnnnnnnnnnnnnnnnnnnnnnnnnnnnnnnnnnnnnnnnnnnnnnnnnnnnnnnnnnnnnnnnnnnnnnnnnnnnnnnnnnnnnnnnnnnnnnnnnnnnnnnnnnnnnnnnnnnnnnnnnnnnnnnnnnnnnnnnnnnnnnnnnnnnnnnnnnnnnnnnnnnnnnnnnnnnnnnnnnnnnnnnnnnnnnnnnnnnnnnnnnnnnnnnnnnnnnnnnnnnnnnnnnnnnnnnnnnnnnnnnnnnnnnnnnnnnnnnnnnnnnnnnnnnnnnnnnnnnnnnnnnnnnnnnnnnnnnnnnnnnnnnnnnnnnnnnnnnnnnnnnnnnnnnnnnnnnnnnnnnnnnnnnnnnnnnnnnnnnnnnnnnnnnnnnnnnnnnnnnnnnnnnnnnnnnnnnnnnnnnnnnnnnnnnnnnnnnnnnnnnnnnnnnnnnnnnnnnnnnnnnnnnnnnnnnnnnnnnnnnnnnnnnnnnnnnnnnnnnnnnnnnnnnnnnnnnnnnnnnnnnnnnnnnnnnnnnnnnnnnnnnnnnnnnnnnnnnnnnnnnnnnnnnnnnnnnnnnnnnnnnnnnnnnnnnnnnnnnnnnnnnnnnnnnnnnnnnnnnnnnnnnnnnnnnnnnnnnnnnnnnnnnnnnnnnnnnnnnnnnnnnnnnnnnnnnnnnnnnnnnnnnnnnnnnnnnnnnnnnnnnnnnnnnnnnnnnnnnnnnnnnnnnnnnnnnnnnnnnnnnnnnnnnnnnnnnnnnnnnnnnnnnnnnnnnnnnnnnnnnnnnnnnnnnnnnnnnnnnnnnnnnnnnnnnnnnnnnnnnnnnnnnnnnnnnnnnnnnnnnnnnnnnnnnnnnnnnnnnnnnnnnnnnnnnnnnnnnnnnnnnnnnnnnnnnnnnnnnnnnnnnnnnnnnnnnnnnnnnnnnnnnnnnnnnnnnnnnnnnnnnnnnnnnnnnnnnnnnnnnnnnnnnnnnnnnnnnnnnnnnnnnnnnnnnnnnnnnnnnnnnnnnnnnnnnnnnnnnnnnnnnnnnnnnnnnnnnnnnnnnnnnnnnnnnnnnnnnnnnnnnnnnnnnnnnnnnnnnnnnnnnnnnnnnnnnnnnnnnnnnnnnnnnnnnnnnnnnnnnnnnnnnnnnnnnnnnnnnnnnnnnnnnnnnnnnnnnnnnnnnnnnnnnnnnnnnnnnnnnnnnnnnnnnnnnnnnnnnnnnnnnnnnnnnnnnnnnnnnnnnnnnnnnnnnnnnnnnnnnnnnnnnnnnnnnnnnnnnnnnnnnnnnnnnnnnnnnnnnnnnnnnnnnnnnnnnnnnnnnnnnnnnnnnnnnnnnnnnnnnnnnnnnnnnnnnnnnnnnnnnnnnnnnnnnnnnnnnnnnnnnnnnnnnnnnnnnnnnnnnnnnnnnnnnnnnnnnnnnnnnnnnnnnnnnnnnnnnnnnnnnnnnnnnnnnnnnnnnnnnnnnnnnnnnnnnnnnnnnnnnnnnnnnnnnnnnnnnnnnnnnnnnnnnnnnnnnnnnnnnnnnnnnnnnnnnnnnnnnnnnnnnnnnnnnnnnnnnnnnnnnnnnnnnnnnnnnnnnnnnnnnnnnnnnnnnnnnnnnnnnnnnnnnnnnnnnnnnnnnnnnnnnnnnnnnnnnnnnnnnnnnnnnnnnnnnnnnnnnnnnnnnnnnnnnnnnnnnnnnnnnnnnnnnnnnnnnnnnnnnnnnnnnnnnnnnnnnnnnnnnnnnnnnnnnnnnnnnnnnnnnnnnnnnnnnnnnnnnnnnnnnnnnnnnnnnnnnnnnnnnnnnnnnnnnnnnnnnnnnnnnnnnnnnnnnnnnnnnnnnnnnnnnnnnnnnnnnnnnnnnnnnnnnnnnnnnnnnnnnnnnnnnnnnnnnnnnnnnnnnnnnnnnnnnnnnnnnnnnnnnnnnnnnnnnnnnnnnnnnnnnnnnnnnnnnnnnnnnnnnnnnnnnnnnnnnnnnnnnnnnnnnnnnnnnnnnnnnnnnnnnnnnnnnnnnnnnnnnnnnnnnnnnnnnnnnnnnnnnnnnnnnnnnnnnnnnnnnnnnnnnnnnnnnnnnnnnnnnnnnnnnnnnnnnnnnnnnnnnnnnnnnnnnnnnnnnnnnnnnnnnnnnnnnnnnnnnnnnnnnnnnnnnnnnnnnnnnnnnnnnnnnnnnnnnnnnnnnnnnnnnnnnnnnnnnnnnnnnnnnnnnnnnnnnnnnnnnnnnnnnnnnnnnnnnnnnnnnnnnnnnnnnnnnnnnnnnnnnnnnnnnnnnnnnnnnnnnnnnnnnnnnnnnnnnnnnnnnnnnnnnnnnnnnnnnnnnnnnnnnnnnnnnnnnnnnnnnnnnnnnnnnnnnnnnnnnnnnnnnnnnnnnnnnnnnnnnnnnnnnnnnnnnnnnnnnnnnnnnnnnnnnnnnnnnnnnnnnnnnnnnnnnnnnnnnnnnnnncgtcaacagaaatcgcatcaaggtgaccaaagatggctatgcagacattgtggatgtcctgaacagccctttggaaggacctgaccagaagagcttcattcctgtggaaagggcagagagcaccttcctgttcctggtaggtcaggatgaccacaactggaagagtgagttctatgctaatgaggcctgtaaacgcttgcaggcccatgggaggagaaagccccagatcatctgttacccagagacagggcactatattgagcctccttacttccccctgtgtcgggcttccctgcatgccttggtgggcagtcctattatctggggaggggagcccagggctcatgccatggctcaggtggatgcttggaaacaactccagactttcttccacaaacacttgggtggccacgaggggacaatcccatcaaaagtgtaaattttatttgatcatgtggcctctctgttgctaatctctcctggaaacatctgccacatttagtgtgtgtatgtgtattcattctttctcataacttcttaaagtttyttcccctcattattaaaatgaatttaccagtaagaatgagtttttaagatttttataaactgtatactttatcagtttgggaagggagtaactgtaggaaacacaagaagtggaaaaagtctcctcttcctatctcaacacacaactgataaggctttagttctgaaaggaaaagtgagtaacatcaattaacagtgtctggtacgtaaatggagttcaataattatttgctgaatgagtataagtgagccaggcgtggtggctcacacctgtaatcctagcactttgggaggccaaggtgcgcggattacttgaggtcaggagtttgagaccagtctggccaacatggtgaaaccccatctctactaaaaatacaaaaaattagccgggcgtggtggtgcatgcctgtagtcccagctactcaggaggctgacgcaggagaattgcttgaacccgggaggcagaggttgcaatgagctgagattgcactactgccctccagcctgggtaacacagcaagactatgcctcaaaaataaataaattaattaaataaataaatgattacctactgtggaagaaaagcacataatataaaaagtatatcagatttgagtttctcctttaagaatggaagttaacatcttgcctataaactgattactagttagatataaaactactaaaacttttcaaaaccaatacatatttagttctttgatatcttctccttggattaataaggattctcctagtgcaaataaattttatgttcctgtttatacatatggacctttaggatttaattgtttcaaaagctgataaaacattattgagatgaattacataagcgattttaacaatgacaaatgtgaaattcaataacaatttaggcttggcatggtggctcacacttgtaatgccagcactttgggaggccaacgctggtggattgcttgaacccaggagttcaagacaagcctgggcaacatggcaaaaccccgtctctacaaacaaataccagacattgtggcggatgcctgtagtcccagctactggggaggctgaggtgggagaactgcttgagccctggaggcagaggttgcagtgagccgagattgtgctactgcgctctagcctgggtgacagcaggatactgtctcaaaaaaaaaataaagaaaaagaaagacaatatttatatcacttgatataaatagttacacaataaacttgattttttcttaaaccttagttgtatttaaaagaaaaaaaaaaccttaatttattattattttctttccttttttttttttggaggcagggtctcattctgttgcccaggctggagtgcagtggcacagtcacggctcactgcagcctcaacctcgtaggtttaagctattctcccacctcggcctccctagcagctgagaccacacaggcacacaccaccatgcctggctaatttttaattttttgtacagatggggtctcccaatgttgcccaggctagtcctgaattactgagctcaaacaatcctcctgcctcagcctcccaaagtgctgaaattacaggtgtgagccaccgctgccagcttccggcaccttttttctaaaggaattcatggttttgtagcagtagaatataaccagatctacagtagagagatgataccctgagatgaagctacctcctgtgttactctgcaacccaggaatgcagctggtgccatgtctccaaacttccacaagaatgccagtgctgggcatggagccccatttagagtacacatgacctgaggctctgaaaactcttagagatgatgcaatctgggacagttgctcatagctggcctggccaagtcccaccccaagatgccaggccacaacacaaaatttcaagtcatattgttttatcttttcccttgcaattatatagtatatgactctcttagaaaagtgcaatagttaaaacttgttttagtagatgctagatcccaaacttgagtctgctgaagcccttttgagaccttagggaccctattctccattcttagaaattcgggctggtgaatattagattcaaaagcaccacagatgagccggtggttgtagaagtacatgcctgtaatcccagctacttggaggctgaggcagtagtagtattgcttaagcccaggagttcaagccagcctgggtaacatagtgggacaccatcttataaaaacaatttttttttgagacagtctcgctctgttgcccaggctagagtacaatggcttgatctcggctcactgcaacctccgcctcctgggttcacgtgattctcctgcctcagcctcccaagtagctgggattacaggcgcccaccaccacacccagctaaattttgtatttttagtagagatggggttttgccatgttggtcagctggtctcgaactcctgacctcaggtgatacacccggcttggcctcccaaagtgccaggattataggcgtgagccaccgcacttggcaaaaaaatgttttaataacatgaaaaattttaaaaagcaccacaagggttcagattacctatcagcctcttgacatttcgtattttttttttttttttgagacgagatctaactctcacccaggctagagtgcagtggcagtaacatgatctcagctcactacagtcttgatctccaaggctcaagtgatcctcccacctcagccccctgagtagctgggactgcagacacatgtcaccatggacagctaatttttgtatttttgcagagacaaggtttcaccatgttgtccaggctggtctcaaaactcctgggctcaagcagtctgtccatcttggcctaccaaactgcttggattataggcatgagcaaccgggcccagcctagttagtctttattagttatttgaaagacatttttcttttcactttcaacccatgcacactgtgaacactgtgaaatacacagaaaagttcattaaactaacatgctccataatgattcacttatttatttgaaaacagaggttgggtgcagtggcttatgcctgtaatcccagcactttgggaggccgaggcgggcagatcacctgaggtcaggagttctagaccagcctgaccaatatgatgaaaccctgtctctactaaaaatacaaaaattagccaggtgtggtggcatgtgcctgtaatcccagctacttgggaggctgagacaggagaatagcttgaacaaggaggcggaggttacagtgagccaagatcacgccactgtactccagcctaggcaacaagagcaaaactccgtctcaaaaaaagaaaaaagacccggtgcggtggcttacgcctgtaatcccagccctttgagaggccgaggtgagtggatcatgaggtcaggagcttgagaccagccaggccaacatggtaaaacgccatctctactgaaaatacaagtattagccgggcgtggtgctgggcgcctgtaatcccagctactccggaggctgtggcaggagaatcacttgaaaccggaaggcggaggttgcagagagccaagatcgtgccactgcacgccagcctgggcaaaagggcaaaacgctgtctcaaaaacaaaatagagatggggtctccctatgttgcccatgctggtcttaaactcctgggctcaggcaatcttcccaccttggcatctcccaaagtgctgggattacaggcaatcaccactgcacctggccatcatgaataattttaaagggaaccacaacataaccaatacccaagtccaatcggcatggtttttaaaagcatatttaaagtgtataacatggaccaggcacagtagctcacgcctgtaatcccatcactttgggaggccaaggtgggtggatcacttgaagtcaggagttcgagagcagcctagccaacatggtaaaactccatctctaccaaaaaatataaaaatttgccaggggtggtggtgtgcacctgtactcccaactacttggcaggctgaggtgggtgaatcgcttgaacctgggagtcggaggttgcagtgagccaagattgtgttactgcactccagcctggacaacagagtgagaccctgtctcaaaaaataaaataaaaataaagtgtacaaagagatggttgtggcgggttgtttttgtttttgttttaagagacaggctctggccaggctggagtgcagtggtgccatcatagctcattgtagcctcaaactcctgggggcccaacccatcctcccacttcagcctcctgagtagctgagactataggcacttgccaccatgcccagctaatttttaattttttgcagaaacagggtcttattatgttgcccaggctggtctcgaactcctggcctcaggtgagcctcctgtaatcagtagaagggtccagctgccagccacttgtaaaaagaagccaatataataagagtgaggtgtgataaagagagtgagttttattatccatgctagcaaggggagaagtgagtgtagttatttgcaaatatttccactcttcaatttgtggagggaatccaggagcttttgaagagagagtttggagtgcagaagaggcagcggaactaggagttgtcgggtggcgtgacctgctccactggcttgttttgaagtattgtttcatctggtgaaggagccagtgccatcattgtggctagaggtgtctggtccatatccagatccagtccctgaagctgaaggaaatatatgaccaggtaatggtgtgtacttaacaagcatctaggtaaatacatgtgcataaggcacggaagcacagaatgggaaaagaaagggcgtggaggttcagcacattctgagggtgtatttcaagatgaaaggaaactcatatgcagatggtctcagagttctatcttgagactcactgggggaggagaaaggggaaaggaaaaaaagtcttaaggtttgaggctaagctgctaacctgcttagttacactcccaccttggcctctcaaagtgctgggattataggcatgaaccactgtgccaagccaacatggtgttttgatatgtgtatattaacacactgtgaaaggattcacaggtaattaaccaggtaattccaggtaattaacctatccatcgcctcacatctttctctctctctctcttttttttttttctggtggtgaggacacttgtcttagtctgttcaactgcagtaacaaaatgtcttataccgggtaatttataaacaacagaaatgtattgctcacagttttggaggctaggaaatccaagatcaaggcaccagcagatctggtgtctgctgagggcctgttcctcatagatagcaccatcttgtgtcctacctagtggaaagagcaaggcagctctcttcaacctgttttataagggcaccaatcccattaatgagggttccaccctcatgacagtcacttcccaaatgcctcgtgatgtgtgtgtgtgtctgtgtgtgtgtgtatctcaggggcgtcaggcctcaatttcctcatctatacaatgggtataacaacaatcccatcttgttgggaggaattaacaatcatgcatcgagccctgggcctcaggcttcaatgtattagttattagagctaatcattatttaatgttttaaacacccccaggaagtagagaacattcctgtcacattctgcagaaaaagaaattgaggcaaggggcaaagccatttgccaaggtcatagatcctgcaagccaatggcaaggcaggatctgaacctggggcttcagatcctggggctttacctgattaaataccaagagagagtgctgagatttttttggtggtggacagtccctgaggcaagccatttttagagcatctgggccacttggggaattgaatctttaccagggcttcccacctcctgttgccccttctctgaaggtgacccccctcccacagtagcaccccaaccactcagaacccccaagccaccttctttgcacatgctgaag

SEQ ID NO: 94443 - DNA, 37875 bp, Homo sapiens
  misc_feature (1)...(37875): n = A,T,C or G
cctccccatgccactggtcaccatctcaagcctcccctgcagtttccccagctccttccctgtatggccttcagtctttgccccaggccttctgtctctcccatcttgcatttctcttgcctctgacctctcctaaactccagattcctctcctccggaccagcatttatcccaccctcttgggtgcctcctgacatcctcaccccagttttctgtacccttctgggctctgacctccctcacctcattgatgtcactgcagtgggtgccgttgccctgcaggccaggggggcagggcccacagcggtagcctgggtactcgtacacttccatgcagtccacacctcggaagcagggattggggctgcagtgggaacgctgctcatggaagcctgaggggtggacacagtcagagctacccggtggtcactatttaagccaccagaagggaaagccaaagccattgggtggggaacgtggcacggtcatgtggagcctcccctgctctcccactcaccgcacacctgacactccataatggtgtttcggatcagggacatttccttcacctggagaaggatggggaggagtcagcacttgacatctgccaccctaccccagaatcagtgccacccttcgccagcccacccaaacctggtctcgtatatcatcccgcagctccaccaggatctggttgaagagggtgagttgggtgaccagcgccttggtctgctcccctgtcgggacccagggtgtgaggggttcagtactggagcaccagtcctgggccctccatgggcaataagccagtacctgccacggctgcccacccctgcctttaaacctactacattcctgactgaagaggacttagtttcaggcagctgccagagcctggggcctcctccccgctccccgcttccgcttcagtgtggcctactcacctagaatggagtgcagtgcattggtcactggagaggagaagaaaacatagtcagaggggtgaggtgaagtgaagagaggcctggttggtgagaaggaggaaggaaggtgaggacagggacagggctggagccccagaataaagatggggtgctggatgctgggagggcagagctggcagacaagcagtgccagctccttctatggggcaaaaggccctctaagggagttgcttcacaggaagttagaacccaaatcctcctggttcctaggcatggtagtggcagaagggatggacccaaagcagggccagggccccagtatatccccattttttttttttttgagtcggagtcttgctctgtttcccaggctggaatgcagtggcgtgatctctgctcaccacaacctccacctcctgggttcaagcaactctcctgcctccgcctcccaagtagctgggactacaggtgcccaccaccatgcccagctaattttttgtattttttagtagagaggaggtttcacagtgttggccaggctggtcttgaactccggaccttgagggatcagcccacctcagcctcccaaagtgctgggattacaggtgtgagccaccacacccgccatcccattcccttcttcaagagctctccctcaaatatctgggaaaggtgggtcttttatttaggtgagagcttctgaacatccctgtcagagagaccaggcagatgggcaacactcagagaaattgctggtgacagctgccagtgagaactataaaagactcgagaccaggccgggtgcggtggcttacgcctgtaatcccagcactttgagaggccgaggtgggtgcatcacttgagattaggtgtttgagaccagcctggccaacgtggtgaaatcccatctctactaaaaatgcaaaaattagctaggcatggtggagggcgcctgtaatcccagctgcttgggaggctgaggcaggagaatcacttgaactcagtggagactgcagtgacccagattgcaccactgcactccggcctgggcaacaggacaagactccatcaccaaaaaaaaaaaaaaatactcgagaccagtatctcttggtcagccaaggccaagcaattaaccaattcttctcttagatcactttttttctcggatgggtgtattggagattgtggagtcaggtgaaagatttggaataacagggttagaaaccctaggaacaggtgagccaaaggaatgggttttaagggagagggagatcaagaagacaggagtcaccaaaggccacaggatccgtggtccaatgtcagcaaacaagtctctgtgttacctgcactgtggatggactcgtccccttggaatggacactcactcagggctcctacccgggccatggacccacccagaataattttcatagattccacaaagccctggggggatagcagcagagtaaggtgggaaggtctaccaaccccttccccagctggtgcaaactctatttccacagaactcagaggctcctcccggctcacctgcatcctcaaatacgccttctgtccagtcctaatctccagcccatcgacctccgctggaggaatgggggccagtgctggaaggcctgcatgttggtcacccagtttgcagtccacgtagagatgtagggcagggctgggtctggagggacctcggagtcgcaggagaactgtgtgtgtgcgcccatcagccaggcccgcttgctgtaggttcacggcgtggactttgccatcctcccgctggtatcgcaccagtactgcccaggaggggagatcagtatgggcgctatcccccaccccctgcctcccagctgagccttggatcaactctgctagataccacatctctagggcccctatccctaattctactatgtggctctcaacaccttgtatttaataggtacacaataaatgtttttgaaattgctttagaggccaggcacggtggctcacacctgtaatcccagcactttagaaggccaaggtgggcagatcacttgaggtcagaagttcgagaacagcctggtcaacatggcgaaaccctgtttctactaaaaatacaaaagttagccaggcatggtggtgggcacctgtagtcccagctactcaggaggctgagataggagaattgcttgaacccaggaggcagaggttgcagtgagctgagattgtaccactgcactccagcctaggtgacaaagcaagactccatttaaaaaaataattggtttagagacaaatactttcttagtcttcattggtatcagatgactgtatcctctcctagggtgacagctggttttgtggccactgacctgttccagggatctgaaagacctttctgtatcaccgctgaggcacagagacatgcctcaccctccttccaggcatccccaagtacaacctcccatccctataaatatcaggactcaagcctcaccctattgtttggtacatgggctcctaaagcaccttataagcaccccataccaggtgcccctgatgtctgggcacagcctgatgggaccttggtccctagtggaggccaaggagaatgaggaagcacttgggaagtagggatgagggagagtgcttaaggaggtcaccattgcaagaaaggagatgcccaccagtcacctttgttgatcttgcctacaacagaggcctccagccatcgagtgttgtcttggcgagaatagaggccaaagaggacaccaccctgcttggggggcaggcggaaggtggataagaggtagatgtccccagcagtgagcaaggctgtccggatcttctctgccacagctaccatctgccgagactcgcccacagtcagcaggtcaattactggtcaggcaggggttatcaaggttagagaatgggatcaaatgctaaggtatgccctcccccgagcccacatcaccccctacccccaccaccaggcagcgttagtcacctcaaaattcaacccttggctgggcatggtggctcgcacctgtaatcccaacaccttgggaggttgaggcaggtggatcgcctaaggtcaggagttcgagaccagcctggccaacacggtgaaaccccgtgtctactaaaaatacaaaaacaacaacaaaaaagaaaaaaaaaccacctagccgggcgtggtggcgggcacctgtaatcccagctactcaggaggctgaggcaggagactcgcttgaacctgagaggtggaggttgcagtgagccgagatcgcgccattgcactccagcctgggcaacaagagtgaaactccatctcaaaaagacaaaacgaaaacaaaaaaaaacctcaacccttgttgctctcagaggacagaggcactgtgccttcctttccccattattgcctattactaccttccaggaacctgcaggtttgagactcacttggaaacacagaaacagcaccccacaaatttgagatgcccccaccaggtggcgcaaaggagatgctgtgctgatcccccacaggagtggcacctggtgtccacaacgtagaaatggaaggcagcttctctttccactcctgggtttggctcgttccacaccctagttcccctcctcccatcctaggggcgcagcacactcgctctggataagaacagctgcccactgaggactctaaccctcccaccatctgggctatctcccacgggaatgtaggacccagctcctctgcctcctgtgtcctggccaatctgtggttttccctccagccagtaaagaatctatgcctgtgtcatctgctccagctacctctcccacatccatcggcccatcccaccaccagacctccgggagagcccaggcttcttggtccccacccccgccctgtccttgggcagccaggagcccagggggacgaagcccagggacctacagtacgcccaccttcaggctgctctcccagaccctagggtgcctacagatgctcaggaaccaccccagccaggcagcctgagcatccagttcctgagtcctctgccctggcctcatgcctgaccctgtcctgttccagctcccccactactctccggtgcccactcctctccaccaggccataatttcaccaactctaggcagtcttaagttttcctctggctcaatttctggactcttcccctctccccttgcccacatgttctctgctacttgggctgagggcaaatggggaagaagcagagagcggtctaagaggatggagacaggcttaccctgcagatcctgactggcagatgtgaaaaagcaaaggaggagaagagccagggccccccgaagttcctgcgtctccatgcctctcagccggctcactacccctggcaggcaggcagctgggaggggaaaaggctaggcggagagagcaggagccggggggcggagggacagaattggagggggggccagcaggcgggtgagggggggctgaaacaaagagctgccaatcaccctggaggcatcatcagctctgggaaccaggggcactgggaaagaatcctggaggcctccctgctttctacctctccctaatgatcctcccccaggtgcctccctctccgcagtcatcattgttgggggtctcggcacacagcgctaccgaatgccactgttttctggaagccacgattgtggaaggcaagaacccctggcaggggcagtgctagacagtgggcattattccacagctggcaggaaaggatgccaagggagtggccgcaactagcttgctatagtgcccagggatgcccacatggcatgaattttgctgttctggcggagcaagtgctctttattagggtggggggtcccctgacaagtgcctgtttctccattttccctcattcgtaggaaagcttgggagtctggaagcgtctgacgggaactgaagggagaatctaaagcagtggtcagtgaggtcagagtgaagaaaccaaaaaagaggaaagggacaccagggacaggcgcagaagaccaggggtacaggcgaggagccaaggaccagactgtggaacactgtgggtactagcggacgggccgtgacccggatgaagcagaggggcgcctgagttcccgtcacctaagcgacagcctgcgagcctctcttcccctcccccacccaagccccagcccggcctccgctccggccgccgccaccgcccctgttttgtttccatggcgacaggcggcgcagggcccgctccaaacataacgcgctgtggaaaacatgctgctcgggggacccccccgcagtccccgctcggggacgagccccaaggggccctggagcagtacaggccacgtgcagtttggcaagagcccccagacctggcccaggcgcacaagaccccgctctccagagcctgccgcgccttcaggggttcggggctccacttggacgaggcgccgtgacwctccgaggcgcgccgggccgacagcgctgtcccgctacgtgggccacctctggatgggccggcggccgccctcccccgaggcccgcggcccagtcccccgcagttcagctgccagtcgggccagaagaagcctcgcctccccggggatctccccaggccccctgaccgcaacgatcggaggggcggtggcggggggcgggcccaggcaggggagggcagaagcacacaaggaagtgtttccgggacagagggtgggcaagatggcggcgcccatggagctgttctgctggtcagggggctgggggctgccgtcagtggacctggacagcctggccgtgctggtgaggggtggcgccggcgccctctgctgtgccctgatgactggggagggggccgaactagccaagcatccaaaccttgccagggctactcagcacgggcgcagtgggggaaactgaggcagtcaaagagcgtacgtggccgatatggcctcagtgccctatgctgtagttttctaggcttaatgcagcaatgaaaagacgcctggttgggagttcaggtgatgggttctagtccttgctcatccattcactggctgtgtgaccttgcggagatcctttctctttgggcattttttttctccattcggaggtttactaggctggactgtctcagggacctactctagcttggaattcctgccttctcctcagcccccttctcctcttcctcctcacttaacagcatttactgaggctattgtttgttagaccaaacgactcacagccaggctttgtataaagagcttagcaatcagacttcctttgcttcatttattcattgactccttgctttaaagaggatctattagatttcttccaaatattaaacattgccaggcaaagatgaataaaatttggttcctcccttcgagtttacagaaaggcagataggtaagcaaataaatataataaaatattcacatataagttaaagtaggaacagaccacagatactgccaaagagaagggcattatcagtgcttccaagaagagggatactggttaggaaaagcttctgaggatagatgttcaccaggtagatggcaagagaggagatagaggaaaggattttcctggctgtcctgtaatcacagacatgtccggaatctctctgagccctgtgttgtccatttgtaaaatagaaatggtagtgactcccccttttttttcgagactaagatactaagtatagggaatggcacataaggtattcaataaatgttatttctcttcttgataccactgtgggggacatggctctgcctctctgacttctgcttccttccctgcagacctatgccagatttactggtgctccactgaaggtacacaagatcagcaacccctggcagagcccttcaggtacccagtatcccttgggggtaaggaagggtgtgtacaaggggagaagcaagaaataggcaggaatgtgttgcaactatgtatgactaggcagctaagggtctggttggtatacttccctctcaatatcaggaactctgcctgcccttcggaccagtcatggagaggtcatctcagttccacacaagatcatcacccaccttcgaaaagaggtaggtgacttggatagagggggctgccagtgagagaagttcagtcarttctatacaatacacatttattgagcaccagatatatgccatgctagatgcaggtgacccagagcatcaaggagcaacagtcttgtggcagagacacacacaatgtcactgtgatgtattaaagcagtcggcaagagatgaaacttagggcactgtgaggcagggagggagaggagcacaggctgaaggagagtggaagacagcagttggcctctgatggtgggactggagagagatttctaagggccacttcctgttttcagggactaggttgggctagatatggggctcaggatggacaaggcttagagccaggttggagaagatgaaagagcattactagaggagtggggaggcctaggctatgctctttactctgccattgactatgtgatctcgggcaggccatgtaacctctcagggctgtgcactcccttatttgtaaaactagagggctgggccagcatgttttccaagggttcttctagcattgacggtcaggttccaagagggaacagtgtcagaagtaggacactcttcctcatttctaacttcccaaaggttgaggacctggggaattaattgagaggcctggaaagagaggatccagataaaagccwaagttcctggcagagccgaggccactgccctgattgcttaggtgtgaacagagcttttccagtttccraagtattctaaattatttcctaacacaggggcattcagagaaagagattcttacccccattccacaggggagaaactraggcttagggagatttaaggatcatgctgaagaggttatctggggacaaagcttactcaggatgtggwgggggatgctgaggaacagggactggagcctgggaaggtagggcaggctgagacctgggggtatggrtggaatgtgtatgtggtaatggtgtctgagcgatggaatgaagtgaaagaaatagccaagagctgggcactgagggaacaagctggggggccctgggcgtgggttccctggatccagggagtgtgaggatggctttcyctggttcctgaggcatggaccgagtcctagcctgcatctgagctccgttgtgctagctttgtggtgtctgggtcggggaagttactgttagaaagttgccgtcagcgggcgttgttccagctttccatggaaattctgggagctgctcctagtttgcggcggagccttccttccttccctgcattgggcgctggaccttcacggccaggaggctccaaggcccaggcttttcgccaacagcaacaggctactggctgggcccaggcaagggggccttggcaggaaaagttccttgctgtacctccactgcactcagaggccagtgaggggggtaccakacaggactccttcctccctggtgaagtgcccttgcagctccctagtgtccacgccatggatatttcctccacagaagtacaatgctgattatgatctgtcagctcggcaaggggcagacaccctggccttcatgtctctcctggargagaagttgctcccggtgctggtgagtgtgcccagacctcccagcatccatggccagccggggagggttcgggaacacwcagacccacacacaggctcaggaaagcatgggggtcagaagcccaccttgaatcagacaggtgcactggctcagacctrcctgtttcttcctgccyacccaatccaggtacatactttttggatagacaccaagaactacgtrgaagtgacccggaagtggtatgcagaggctatgccctttcccctcaacttcttcctgcctggccgcatgcagcggcagtacatggaacggctacagctgctgactggggagcacaggcctgaggacgaggaagagctggagaaggaggtagctctgagaccgggggctattgtatgagatgagccccaaggatgctggccaggaatgggagtgcttaggtgsrgaggtggcactgttcccrcagctgcaagcctacctgtgtcgcccctacagctgtaccgagaggctcgggagtgtctgaccctgctctctcagcgcctgggctctcaaaagttcttctttggagatgcgtgagtctgactccaagagggtaatgggtggcttggaagaagatacaggttcagatggagcagctggagctggggctggggctggggctggctcaggctctggataggaggtccctgrgayagawactggccctrgtgacagtggggctgtgcgtggggccagagccttctcagaggtacaaaagggtagggtgggagggcagccaggcacaggargggcctgaagagctgtggggcactgartgtgccctttatgcagccctgggatagagccctattcagggccaggctggcgccacctggggatctctccccataccaggtctagaactgtgtgtcctgtccttccctggtggccgcctgctgcccagagcccacctcccaaggctgactcttcctccagctccatctttaccccttctaccccagtggttctcctccatcccacccttctctctctgctccagccctgcctccttggacgccttcgtcttcagctacttggccctgctgctgcaggcaaagctgcccagtgggaagctgcaggtccacctgcgtgggctgcacaacctctgtgcctattgtacccacattctcagtctctacttcccctgggatggaggtaaggggcagatgggaggggcagccctggggagagtgggcagggatccaagaactagttctcctaacacaccttccttccttgaccctcagctgaggtaccaccgcaacgccagacaccagcaggcccagagactgaggaggagccataccggcgccggaaccagatcctatctgtgctggcaggactggcagccatggtgggctacgccttgctcagcggcattgtctccatccagcgggcaacgcctgctcgggccccaggcacccggaccctgggcatggctgaggaggatgaagaggaatgatttgtcctcacgctcccaagactggtttttctactctcatgcattccagaggcccccgtgcctcctcgttgttggtacagccggacacggggtgctgccacccagaataaagccactcacactgactgggctcaaacattttctcctttaagagctgccatttttcctggctggtgccataggaatcatctgggtgcctgggcacacccgctgctgctttaaggcttccgccctgatgctgacactgctgctccacgggcccagttctgcatctccaggaaagacaaacagtctccagttttgggcccagctttcctagtctcttcttttccttaccctcagccctgatcttgtgtttgtacggacagtgagctcaccctaggcctggacccaggcccagtttccaaagcaagcagcacacagcgcatgttcacataagcatgggggctggggggacactggggcttactgatctttttctaggggcctccagcccctggcaccacctagaggggaaagtgagtcacccaaaccattgcccctgggcttacgtcgctgtaagctcacrctggccctgttgtgccctctttagtcacagacagcgtgtgagctgactctgtccctttaatgcccaggctgagcccagtgcctccttgagtatctgctccatcactggcgacgccacaggtaggtgtgaatggagtagccaggtgagattgtctccaggaagcccacagcaggatccttgatggtaagaggcacatccttagaggagctagggagcagggaggagaagctgagagtgtgatcctgccaaggcccccaacgctgtcttnnnnnnnnnnnnnnnnnnnnnnnnnnnnnnnnnnnnnnnnnnnnnnnnnnnnacaggagagccatcgggatgcatcagtgccactgcgtccgggtcgttcttctgactggcaaccagccccactctctgggagccctcaggaatgaacttgctgaatgtgggaacagatggtcagagtccctcggggtacctcccatgaaaccctcatctaagaagtcgcccacccacggacccaccccataactcctgcaaaggctctgccctggctctctaggcctggagccatgctgctgggcactgaccctgcttttctgcatcgcagtccagcctcaggcattggggttttctgttgctacctagtcacttcctgcctccatggcgcaaaaggggatgggtgtgcctcttccgaggttccaccctgaacaccttcctgctccctcgtggtgtagagtgatgtaagccatccgatgtaggagatgataggcctggtatggaatgggggtgcccgccctccactcacctgaagtggccaaggtggtagaacatgggctgtttgtaaaacgtgtgcttggtgatgtctacaatgatgggttccagtcggtccagccgaccacatggtacaggaggttctagggtaaggacaaaggcaargagacaaaggcgcaacactgggggtccccagagagtgtaggtaagggtcacgtgtgggagaggcagctgtgggtaggtcagccctgtgaggggcacattccttagtagctaaggagttgggggtgtgaagatccaggcatctcaaggggagctgagaagtctgaggcagctgcaagtgcctcagtagttgcaaaaggggcaatgaggtgtgcagacctgtgaaggaaaggcaagacagggaatcatggttccccagagttgcscaaaagggcaggctacctggggaaagctggacaggamgggcttctatcagtctttggtgagactactaatgggtctgaggtctcctttgcaggaagggagactggggtggcttactgtgatgatgctgtggctgtactgcatccctcgatcccaggagcctagccgcacactctgctcccagaacttggaacccacacaggcctctgaggcaaagagcatggtgttggggaacaggtggtgtgtctcccttagggtggctttggctggagccagaaagtccaggtaccaatgtacagcaataccatgaacatacttagctgcttctgggtctgtcagtacctgcaaaggaagaacaagtcaccctggaccctgcccacaggcttctggaacttctagttcctcttgtaggaatcctgaattaggtggtgggaagaatgcaactacagaggttttgggagggattttttgtttttgtttttgagacagggtctccctctgtcacacaggctggagtacagtggcacaatcatagctcactgcagcctgaaattctaggctcaactaaacctcccgccttagcctccagaatacttgggactataggcgtgccaccaccacacccggctaacttttctatttttttttttgtagagttagggtttcaccatgtttcccaggctcatcttgaactccttaggttcaagtgatccamccaccttgggttcccaaagtgctggaattatagccatgagctaccacccccagcctagagaggtttcaagtcccaactgtgggatccatggcaccctggaggtcccggggaatggtgctctaggatccatagttgggtagaaaaatccctctaagtttgggagccaatcatttggatgctggatttgaaggtcactggagcaccatggaggtccaggccttaccacctttgcccagtggggcagcagcaagcgttggtcatccagcatgagtaggcggacattgtggtgagtaccgttggcaagggtaggacctaggtcacgggcaatgaagtctcgctgatgttcaggggtgaagcccaggcactggaaggggtatccactcaacagcccagcagaaggctcattttcasctgtcactgcccagaactgtaacttgtgctcagcataggcatccaggaacctggcaagagaaaggtcatgartgatccagccaagaaagtgggccagaccgagagaacaggaagcctgatggagtgggcaagactgacagryccaagkttgaaaggcccagaaggtagaaaggtgagctgaggacaggcagatctggaagtggaaccaggttgagggttgggacacagatcagcatggccaaaggggaggccagtcctgatcccacatccttgytgatcccttacttcacaatgtatctggcccaggtctggtggtagatgtctcygggctgtcccttgagtggccccttcccattccccgctcccttggtcttgagccragtgggtgatgtccaggggctggcaaggagtgaaacgggacgctgggccaactgcagggctcggtgaatcaggggtatctagagacaaaggtagtgaagagagaagcacccagagttggaacacatactagcccaaccagtgcatccggttcagccattagcccccaccctcccacccccaggacaaaacagcaggggacaaaatgtctgtacaagcagacctaccctacagtttctcaacccccagacatcagggccctcagggcctgaaaaagctagaatgcctaccttgagcttggtatcttcctctgggaggctgaagttgtgcaactggaaatcatcaggggtgtctgcataggtgtaggtgcggatggagaagtcacagctggccatgggtacccagatgatgttatatccgattcctacagaaaaggatgatcaagatatggtagtccgagtcaataggagagtatgggactctgcttatcacttgccagtcctaatagtgtctgagtcagggccaaaaggaacttgggctcctgggttggaacctgtggaggctggcacctgggtgaagcgcaggcctttctgagcctgagtccgtagcagttagcagatgataggcggcgaaatcttatttcactggcattaagacaggaaccaaatgtcagggatgggcagaagtcagggtccaaagaattggcaaagaaaagtgtcagtggctctatgtcatcctgtccccttcctcctcatcttcttcagagaagtaccatttaagtagcaaattctgggcagggggtgacagggcaaggatgttgagggcacctgcatctgtcacggcccctccaaatcccttcactttctggaacttctggctgcaggatcagtagcaggcctgaggacatccacagggttatcagtgcccaggggagaaactccatggtgatcactgacaccgtttacctctaggaggacccagcctggcccggggggtgaagggtgtaatggttacctgtgccggtgcaattagcctgtatggtcctgtactcagctycatccaatgcccactgcttctgctcttgtagcggctgaaggyacctagggcaggaaaggtcggggggtcaagagtcacagtatgtggcattgcagacacagaccaccgagctgtactgaagcttttagggatgcaggggcaccacctgggagggagggagcacaagcagaggtgaggtctgacaaggatgtggagaacggacacagctgtttggagagactgaagacggtttcaaaaatcctcaccccaaagttggtctcagtcactcaaaaggatttattgagcacctactaaaagtctaccaccagcttactggaaggctaccaaaggactatgaggcagaagggaggctctgtgctacctccccactgccttgactcactcatctgatgcccacgacactgcctgaagtagaagcaatcctgtgaggctgccagccatgatgcttaccctacccgaaggcttgggacattcctgaggacagaatgaggaatgactraaaagcaagyccctctccacccctcaactactctcccgggcagggcttagctgcctttgggtgcccatggcctggtctcccacattcattaggacaaggcccacagacacctgggtgcagctctccctgcaacccttctgatgacaactctctgcccaccccaaatcaggatgctccccaccactcttcccacccatttcaacttcgacccctccctccatctgtgccttgctcaaagagccatgatggccctggattcaaagagagtctgtcattcattaaattccagtgccaggattccagaagcactgtgacaatgctgattgggagctctctctcttacctctctggaaggacttgaaaactccatcacctcagggtcactagatgaggagaagagcacaggggttccagagtctctgaaggatagaggatccactaaacaaaaacaaggatgcaggtaccygccatagctataggcactaggttactcctgcaagtaattctggcttcccaatgtggatgggtcatgtgatgactaggagmgtcacatgacacaggaagtgaggcaattrcagccatatttctaaagggcaattggcttcctccgagttgttacagattatacaccctataaaattctggagggtatatgtgaatgacaactttaggaagagcctagaatacgaaagacagacttggatggagaatcgggtaaagattcctaaatcccagaggatgggaaccacagcaggcacgctgcttttttgataaaaatttcaaaatgatacaaataaagctaataccaaaaaaaaaacaaagaacaaaaacaaaaaaaccttcattgcacaacatgctgaggctaccgtgatgtttaagacacagtctttgccctatagaggtgcatgaagcatggaagtcagacacagatatttacaggtaaaaacagaaacagtaacaggtgtgcatggagagctctctgagatgaggagggaccattcgtgggtggggaattatccaggatgccttcaacacaggaaaaagtgaggggggttattagccagtgaagtgtagggcgcaaggagggtgggacactggcagtggggtggcaggactggagggaggggagtggtcagcttggctcccctgcagcacccctcatttactcattaagggcctcggagagtcacatgacacaggcagtgaggcaattgcagccatatctctaaagggcaattggcttccagatgcagattgtaataactgttcttccttcctcacaggacagtgaggttttaaagtagttcagaaaccagaaagtgttgtaaaaggccatatgcttagtggacatgtgaaggaagttgtccatgccatttgcctcatgaaccacatcaaatgagatttggtgggagtggcacacacagtcatgaccagactaaccccagctctcagcctatttcctcacctagaaaatggaggcaatgccacaacctcaaaggggtcagtgaggtaaatgcagtgcctggcaacttgggaggcgcctgggaactatttgtctgttgtttgtatctttttttgtacagtyttagtgagacggcaaggttggaatccttgctacaccatttactggctgtttgaccttcagtaaatcaatcactctaagcctctatttcatctataaaaggggagtgataactcctacctcatagaactgttgtgaggtttgagtgtgataatgtgtctctagtacactgcttgacactaaacattgcaacatgtcaggcctctgttcctggagttccttgaaggaatgtcttacacattctaaatatccttgtagacagcctggcacaggggtagttgtcaagttgtagaattgaactagttgcttcactatgtcagtagccaccccttccagacttcctgcttttctcttttttttttgtttttttgagatgatgtctcactctgtcacccagtctggagtgcagtggccgatctcagctcaccgcaacctctgcctcccaggttcaagcaattctcctgcctcagcctcccaagtagttgggactacaggcacgcaccaccacgcccggctaatttttgtattttagtagagatggggtttcaccatgttagccagactggtctcaatctcctgacctcaggtgattcgcacactttggcctcccaaagggctgggattacaggcgtgagccacagcacccggcctgacttcctgctcttcaaggaaacgttgcacaggatttgttctgggtagggcaggtaattatctagtaccttacttccctcaaattcattcatctcacagatatttcctgagcacattccacatttgcctctcctgctttagcgagtttagaagttcaaccatctcctttctcttaccctctgtgtacagggagtgagctgcttcttttttggccaggtactgagcaaaatttttttttttttgagacggagtcttgctctgtctcccaggctggagtgcagtggcacgatctcggctcactgcaagctccgcctcccggattcacgccattctcctgcctcagcctcctgagtagctgggactacaggcgcctgccaccacacccggctaattttttgtatttttagtagagacagggtttcactatgttagccaggatggtctccatctcctgacctcgtgatctgctggcctcagcttcccaaagtgctgggattacaggcgtgagccaccacgcccagcctagtgtctgtattttttgtagaaatagggtcttgctatgttgtgcaggttggtctcaaactcctaaacccaaaggatctcctgcctcggctttgcagagttctaggattacacgcacaaggcaccatgcccgcccctcttttcttctttttatacttcattttgtaaaatttttccagggtggctgggcacggtagctcatgcctataatcccagcactttgggaggctgaggcagtggatagcttgaggacaggtgttcatggccaacatggcaaaatcccatctgaaatgaaaatacaaaaattagctgggtgtggtggtgcacgcctgtaatcccagctacttgggaagctgaggtacgagaatcacttgaacccaggagtcagaggttgcagagacccaagattgtgccactgcactccagcctgggagacagagtaacactctgtttcaaaaaaaaaaaatttccaaggtggatattatttcacatttcatatttcctgtacaatgtgatttgtccttgaggattttctattttattttctaagtaaagttagttttaataaggactaatgtttattgtgccaaagacaaaattacaacaaatttaacgatctcgactggattccttccttcctgccttccttccttcttttctcctcttccctcccctcccctctcttctcttttttctttctttccctccctccctccctccctcccttcctcccttcctcccttcctttctttctttcgacggagtcttgctctttcacccaggctggagcacagtggcttgatcttggctcactgcaaaccccgcctcctgggttcaagcgattctcctgcctcagcctcccgagtacctgggattacagacgcacaccaccatgcctggctgatttttgtatttttagtcaagacggggttttaccatgttggccaggcttgtcccaaactcctgacctcaggtgattcacccgcctcggcctcccaaagtcctgagattacaggcatgagccaccatgcccggccctgattgggctttttctacaaaaaattcttgtgaaacttttctgcaatattttataataaagtcctactgatttatatttgattttatatttgtaagtcaggtgaaatgagtgaattcttccttgtgtatgaatgtactacatgttgcagaatgtctacctttcctgggctccatccactaaattctcaaagtgcctcctaatcattgtctctattaaagatgccccacaaatttccaaaatgcccctagggtgtgcctgagagccactaccctaggtgcctctcttcaaacacctaggcctcactgcagtggccaataggggcatactaggtggccacaatcacgttcctctgtcccctttgtatagcacttgaaaaagagtttgctaaggcctggtacggtggctcatgcctgtaaccccatcattttaagaagctgagacaagaggatcccttgaggccaggagttcaagaccagcctgggcaacatagagagactccgtctttacaaatatatatatatatttatttatttatttttattttttttggtagaaaaggggtctccagtggccgggcgcagtggctcatgcctgtaatcccagcactttgggaagctgaggcgggcagatcacgaggtcaggagatggagaccatcctggataacacagtgaaaccctgtctctactaaaccccatctctattaaaaatacaaaaaattagccgggcatggtggtgggcacctgtaatcctagctactcgggaatctgaggcaggagaatcgtttgaacccgaggtggatgttgcagtgagccgagacgcgccactgcactccagcctgagtgacagagcaagactctgactcagaaaaacaagcaaacaaaaaaagacagctatatacctagggaagacataaatataagtgaaaagcagaagtacaaaaatagttcggctgacccagcagcaattttgatcccatcccagcaagacctgtcttggagtgtaggtctggctcagatagcaaactccagccctttcacactgacaggtatcatatcacaggctcctaggtctttaggtcccatggagagtgccactcccagttccactgttagttacttctatggtctgtgttcaagtcaaataaagacatttgttcattccatgcacagcacagagtaggtgctcaaaaaagtactttttatacagatgaatgaacaactactaccagttaacctagaacctgtcctttcagctctagtttttaattgtaattttattttattttagagacagggtcttggcacaatcacaattcactgcagctttgacctctcaggctcaattggatcctcccacctcagcctccatagtagctgggactacaggtacatgccaccatgcccaactaatttttgaaatttatttttagagatggggtcttsctatgttgcccaggctggtctcgaattcctgaggtcaagcaatccacctgcctcagcctcccaaggtgctgggattataggcgtgagccatcactcacctctagtttctggcctgagggtatattactctccctgattactgacaccaaaaatgatttcactcttgggtgggacctctgctgccccttacccactagggtgtgggtttttttggtttgtttttgtcttttttaagacagggcctcacactgtcatccaggctggaatgcaatggtgtgatcctggctcactgcagcctcgaccacctgggctcaagggatcctcccaccttagcctcctgagtagctgggaccagaagtgcacaccaccacaccaagctaattttttaactttttatagaaacaggttgcctagactggtatcgaactcctgagctcaagcaatcctcttgccttggtttcccaaagtgctggaattacaggcgtgagccactgagtctgaccttagggtgtggttttaccattggattcatgtgatttaccaatgcttcaacagtaaccacaacattcaatgtacagcccagtgcagatggaaggtccttgtacctcatgatctcttccaatttttcgcaagataatagtcagtctttcatgagtgcttattacatgcactagcctgacaactctacattacagataagaaaattaagacttagaggccagacgcgatggctcacacctgtaatcccaacactttgggaggccgaagcgggcggatcacaaggttaggagatcgagaccatcctggctaacacggtgaaaccccgtctctactaaaaatacaaaaatttagccaggcgtggcggtgtgcgactgtagtccccgctactcgggtggctgaggcaggaggatggcgtgaacccgggaggcggagcttgcagtgagccaagatcgtgccactgcactccagcctgggtgacagagcgagactccatctcaaaaaaaaaaaaaaagaaaagaaaactaagacttagagaagttaaatatgtggcagagtgaagcctaagctcatatctgtcctaatctaaattccaagcagttctgagtcatcaggtcacacagactgcttctcacatgcttcaggaatgccttttcagtcttccttaaaggttgcaaacagttgcaaagcaaatttcatggttcctgtttcttcaaaatctcaaagctcttcattcagccaggcatggtcgctggagcgtgtatattcaaccacttgagaagatgaggatcttttgagcccaggagtttgagacgaacctgggcaacatagggaaagccctgtcacctaaaaaaataaataatacaaccagctcttcatttagaggcaagcacaaaataggtgctcaatgtttgttgaatgagtgagttgttaccaaccataccccaytattcaaggtcctgcttgtcagtgtttcaggaagtgttcttggcaaaggagtggtgaacttcaggaagaatgatgctgactccgaacacaattatttatttatttatttatttatttatttatttatttatttacttattgagacagagtctcgctctgtagcccaggctggagtgcaatgacgtgatctccgctcactgcaacctctgcctcccaggttcaagcaattctcctgcttcagcctcccaagtagctgggattacaggcgcccgccactacgatcggagaatgttttgtatttttagtagagacagggtttcgccatgttggacaggctggtctcaaacacctgacctcatgtgatccacccacctcggcctcccaaactgctgagattacaggcttgagccagtgtgcccagcctgaacacaattattaaagtcaaagtgagacctaacagtggaactttggttgcggctacaggaaatatggattcaaatactgaacaccagctgggcacagtggctcacgcctacaatcctagcactttgggaggctaaggtaggaggacagcagagcccaagagttcgagacaaacctggccaacatggtaaaacgaaaaaattaaccaggcatggtgatgcacacctgtagtctcagctgaggtgggaggatcgcctgaattgaggtagtggaggctgcagtgagctgtgttcctgccacagcactccagcctgagcaacagagcaagaccttgtctctaaataaataaacacaacaaaaataaaacaaatactgagccaggtgtggtggctcctgcctgtaatctcagcactttaggaggctgagatgggcagatcacttgaagtcaggagttcgagaccagcctggacaacatgatgaaatctctactaaaaatacaaaaattagctgggactgatggcgctaatccctgctactcaggaggctgaggcagaattgcttgaacctggaaggcggaggctgcagtgagccaagatcacccccactgctctgggttgcagtgagccaagatcacaccacctgggtgacagagcaagactgcatctcaaaaaaaaaaaaagaaagagaaaagaaaagaaagagagagagagagaaggaaggaaagaaagaaagaaaaagaaaaagaaagaaagaaagaaagaggaagaaagaaaaataaaagcatagagagtgctggagcagtgtgagtgagatggatagtggtaaaaggtgaccttggaaaaggaaattgggaggccagattgtgtagggtcttggtggccatggtaaggagtctgaattttgttctaagatggaaattcactgtagagtttggtgctgggaagtgacaagatcacatgtgtatttttaagagatcactttgggtgctgtgtagaaatcagactgtaggagtcaagtgtggagggagaccagcatccaattacagcctgccatgaacttgccaggttcctcttcccttccttcagcacacactactctttcccaccgcttagcctagttaacacttattctttcaaaattagcccggatgtcactttctctaagaacaaccgcgccccctgccgcctccccacctcacacacctcctctaacgcaaactcatagccctcacaacttctttgtcactttttctccccctttttttgagacaggatctcgctctattccccaggctggtctcgaactcctrggctcaaaagatcctcccgcctcagccacccgaatagctcctttgtcgctcttatcactgttgtgattaattgtacaaatggcttaatggcagttatagcgcccagctcatcaaaggcagtggcctgccaatcgtcagcgggcagggcagggaccagtccagtccatcctggctcccatgtgcagccccagtgcgcatcgcgacaccggcgctcgttgccgcgctccgtgaacgtttgtcacatgtccgaagaatgaatgaattatatacctttcttcccactccagccctcaaaaagcaagtggatacaaagacttgaagattttataatcgcttcattagtaaaatttgaccatccttaccattaaaaataatgataatgatgaaaaaggctaagtgcgaacgccgggaggggagagctaaaattcaaagggcgaaatatttataatgcctaccgtcggcgaagagaaacagcagccccaaccgaaggcaaaaggaaatcccaccgcagcctccaaaggcgcgtgggcgggactggagaatggggcccygcgcactaggcgcggaagtcaagaagcagccccaccacccgtgccgcgagaaaagcagccctggggaggcggggcggggcctcacttggaaaagagacggtcactcatccagaggcgggactcagagcccctccacaagtctcattggtccatttgaagacggacaactctccctgaccatccgtagcacagayggggcgcaagcgtattggaaagggagcgggtgccagacgcgagaactacgcatgcgtctcagcgctttcccgccagcacacccttagtgggtggggggggcgattgaattcccacagtgagtccagcccaccgaagctsagaggattcctaaccttcctcttcagagagcctcaggttagggaacgtccagtgcccaaaagctgccctgtgggaatcccattgtccaccgcctcttacctaatgtttcgttctggccttgccccatctcttcctgaggctgggttgttacgatggtgaattattcaagatgtcttgcagcctgacgccatctctgggcagtgctcctgcatcctccctgtcttycttgggagggcaccacgttgctcttacaagcacagggtcctgaaactgtttacaaggccccactctgccacgttagtatcttaacgagtgtttgttgaggaagcactgtgtgttagacccagtgcaatgagcaagtccctgatcttgtgaccttacattctacaggacgacacaaacgtataaacaaaaaataattttagatagtgatacatgcttaaaacatggctatgtggccgggagcagtggctcacgcctgtaaatccaacattgtgggaggctgaggcaggtggatcacttgaggtcaaggagttcgagaccagcctggctaacatggcaaaaccccgtctctactgaaaatacaaaacttagtcaggcgtgatggcagacacctgtaatcccagctactcgggaagctgaggcaggagaatcgcttgaacgcaggagatggaagtttgcagtgagcccagatcacaccactgcactccagcctgggtgagagagccagactgtatctcaaaaaaaaataaaataaaataaaataaagctatgtgatagaatgactgcgatggggattaggtcctcactgaaatggtgagagtggagttaaaacctgaaattaggtgacagcaccagatatatctgcccgagggtttcgtgcttggaaaatagcaggtgcaaacgtccttgtgctgtgaggaaatttggctggaacagaaggtgggccagattgtagctgaccatagtctctgagagcttggagatgattctaaatacaatgggaagccattaaattgaggcagagccttgatgtgacgtgctttatcatcattttgctgagtggagaatggattgctgggaaaagtgaaagattgattcagaggttgtggagagagggtggctggaactaggtagctggggaggtggtgggacgtggatgaattcaagataggattggttgtgttggatatgggaaaagaagtcaccatggttcctgggcttttggaatgtgcaaatgggtaatggaggtgccattgagatgggaacagtggaaaaataaccggtgctggggtgggaatgaagagctcagttgtgtggccgggcgcagtgactcacgcctgtaattccagcactttgggaggccgaggcagggggatcacctgaggtcaggatttgcagaccagcctggtcaatatggcaacaccctgtctctactaaaaatacaaaaacattagccgggtagcggggcctataatcccatctactcgggaggctgaggcaggagaatcgcttgaaccctggaggcagaggttgcagtgagccaagatctcgccattgcactccagcctgggcaacaagagcaaaactctgcctaaaaaaaaaaaagagttcagttagttcagttgtggccatgttgaatttgaaatactcattagacatccaaccagatatgctgagttggatggcgctcaagagaggtcaaggctggasttatgcattaacacatagaaagatggtacttaaagccatggacgttagtagtagggccacctacagaaagagtggaagtagaaaagagggcttacggtgggcaatgtggttcacgcctctaatcccagcactttggaaggtcaaggcaggcacatcatttgaggtcaggagtttgagaccatcctggacaacatggtgaaaccccgtctctactaaaaatacaaaaactagccgggtgtggtggcatgcacctgtagtcccagctactcaggaggctgaggcaggagaatcgcttgaacccaagaggcggaggttgcaatgagccaagattgcactgttacactccaaccygggtgacagagcaagactccatttaaaaaaaaaaaaaattgatggccgggtgcagtggctcatgcctgtaatcccagcactttgggaggccgacgcaggcagatcacgaggtcagcagatcgagaccatcctggctaacaaggtgaaaacctgtctcaactaaaaatacagaaaattagccaggcatggtgacaggcacctgtagtcccagccactcaggaggctgaggcaggagaatcgcttgaacctgggaggcgggggttgcaatgagccgagatcgcaccatgcactccagcctggcaaaagagcaagactccatctcaaaaaaataaataaaataaaataaaaatgacggctgggagcagtggctcacgcctgtaatcccagcattttgggaggctgaggtgggcagatcacgaggtcaggagatcgagaccatcctggctaacatggtgataccctgtctctgttaaaaatacagaaaattagccaggcatggtggcaggcacctgtagtcccagctactcgggaggctgaggcaggagaatagcatgaacctgggaggcagagcttgcagtgagccgagatcgtgcaactgcactccagcccgggcaacagagcaagactccgtctcaaaaaaatatataaaaaataaaakaaaagaaaaaaaacaaaaacaaagaaggcttacgtgagacccttggggccctctactgttaaccagttcaggagaggtgtaaaagtttgtaaaggataaccagagcacaaagtagaagagcaatgtcctcaaagggaaaaattcaagaagatgctgattatggagattaattgctgcttcaaggtcaagtgaaatgcaggcagagaaatggtcactgggtctgacaccacttttggtcactcaaattttggtcagagcagtggctgaagaaacacaggggaaggagtctgatgggggtgggtgataagagaatggatgtttaagtgtggagggaagaaaaagaaaacctattgctatgaaaaggagcagagatagaattcgtggttggaaagtgtgtcttgaaagtttcttttttcttaaaagtttcttgtgcaccatatagcacaagatcagcaacccctggcagagcccttcaggtacccagtatcccttgggggtgaggaagggtgtgtacaagaggagaagcaggagataggcaggaatgtgttgcaactacgtatggataggcagctaaggtcctggttggtatacttttctctcagtatcaggaaccctgcctgccctttggaccagtcatggagaggtcacctcagtaccacacaagatcatcacccaccttcaaaaagaggtgggtgatttggatagagggggctgccagtgagagaagttcagtcaattcygtacaatacacatttattgagcactagatatatgccatgctagatgcaggtgacccagagcatcaaggagcaatagtctggtggcagagacacacacaatgtcactgtgatgtattaaagcagtcrgcaagagatgcagctcagggcactgtggggatatccagaggcacrgtaccttctgcctgtcagtcagggagggagaggagcacaggctgaaggagactggaagacagcagttggcctctgatagtgggactggagagagatttctaagggccacttcttgttttcagggactaggttgggctagatatggggctcaggatggacaaggcttagagccaggttggagaagatgaaagagcattactagaggagtggggaggcctaggctatgctctttactctgccattgactgcgtgatcttgggcaggccatgtaacctctcagggctgtgcactcccttatttgtaaaactagagggctgggccagcatgttttccaagggttcttctagcattgacggtcaggttccaagagggaacacagtgtcagaagtgggacactcttcctaatttctaatttcccaaaggttaaggacctggggaattaattgagaggcctggaaagaggatccagataaaagcctaagttcctggcaaggccagggccactgccctgattgcttaggtgtgaacagagctttttgtttccraagtattctaaattatttcctaacacaggggcattcagagaaagagattcttacccccattccacaggggagaaactgaggcttagggagatttaaggatcatgctgaagaggttatctggggacaaagcttactcaggatgtggtgggggatgctgaggaacagggactggagcctgggaaggtagggcaggctgagacctgggggtatggrtggaatgtgtatgtggtaatggtgtctgrgcgatggaatgaagtgaaagaaatagccaagagctgggcactgagggaacaagctggggggccctgggcgtgggttccctggatccagggagtgtgaggatggctttcyctggttcctgaggcatggaccgagtcctagcctgcatctgagctccgttgtgctagctttgtggtgtctgggtcgggaaagttactgttagaaagttgctgtcagcaggcattgttccagctttccatggaaattctgggagctgctcctagtttgcggcccaacctttcttccttcttctcaatgggcccaggaccttgacggccagcgggctccaaggcccaggctttttgccaacagcaacaggctactggctgggcccaggcaagggggccttggcaggaaaagttccttgctgtacctccactgcactcagaggccagtgaggggggtaccagacaggactccttcctccctggtgaagtgcccttgcagctccccagcgtccacgccatggatatttcctccacagaagtacaatgctgattatgatctgtcagctcagcaaggggcagacaccctggccttcatgtctctcctggaggagaagttgatcccggtgctggtgagtgtgcccagacctcccagcatccatggccagccggggaggggacgggmacacacagacccacacasagrctcaggaragcatggrggtcagaagcccaccttgaatcagacaggtgcactggctcagacctgcctgtttcttcctgccyacccaatccaggkacatactttttggatagacaccaagaactacgtagaagtgacccggaagtggtatgcagaggctatgccctttcccctcaacttcttcctgcctggccgcatgcagcggcagtacatggaacggctacagctgctgactggggagcacaggcctgaggacgaggaagagctggagaaggaggtagctctgagaccgggggctattgtatgagatgagccccaaggatgctggccaggaatgggagtgcttaggtgcrgaggtggcactgttcccrcagctgcaagcctacctgtgtcgcccctacagctgtaccgagaggctcgggagtgtctgaccctgctctctcagcgcctgggctctcaaaagttcttctttggagatgcgtgagtctgactccaagagggtaatgggtggcttggaagaagatacaggttcagatggagcagctggagctggggctggggctggggctggctcaggctctggataggaggtccctgagacagatactggccctggtgacagtggggctgtgcgtggggccagagccttctcagaggtacaaaagggtagggtgggagggcagccaggcacaggaggggcctgaagagctgtggggcactgaatgtgccctttatgcagccctgggatagagccctattcagggccaggctggcgccacctggggatctctccccataccaggtctagaactgtgtgtcctgtccttccctggtggccgcctgctgcccagagcccacctcccaaggctgactcttcctccagctccatctttaccccttctaccccagtggttctcctccatcccacccttctctctctgctccagccctgcctccttggacgccttcgtcttcagctacttggccctgctgctgcaggcaaagctgcccagtgggaagctgcaggtccacctgcgtgggctgcacaacctctgtgcctattgtacccacattctcagtctctacttcccctgggatggaggtaaggggcagatgggaggggcagccctggggagagtgggcagggatccaagaactagttctcctaacacaccttccttccttgaccctcagctgaggtaccaccgcaacgccagacaccagcaggcccagagactgaggaggagccataccggcgccggaaccagatcctatctgtgctggcaggactggcagccatggtgggctacgccttgctcagcggcattgtctccatccagcgggcaacgcctgctcgggccccaggcacccggaccctgggcatggctgaggaggatgaagaggaatgatttgtcctcacgctcccaagactggtttttctactctcatgcattccagaggcccccgtgcctcctcgttgttggtacagccggacacggggtgctgccacccagaataaagccactcacactgactgggctcaaacattttctcctttaagagctgccatttttcctggctggtgccataggaatcatctgggtgcctgggcacacccgctgctgctttaaggcttccgccctgatgctgacactgctgctccacgggcccagttctgcatctccaggaaagacaaacagtctccagttttgggcccagctttcctagtctcttcttttccttaccctcagccctgatcttgtgtttgtacggacagtgagctcaccctaggcctggacccaggcccagtttccaaagcaagcagcacacagcgcatgttcacataagcatgggggctggggggacactggggcttactgatctttttctaggggcctccagcccctggcaccacctagaggggaaagtgagtcacccaaaccattgcccctgggcttacgtcgctgtaagctcacactggccctgttgtgccctctttagtcacagacagcgtgtgagctgactctgtccctttaatgcccaggctgagcccagtgcctccttgagtatctgctccatcactggcgacgccacaggtaggtgtgaatggagtagccaggtgagattgtctccaggaagcccacagcaggatccttgatggtaagaggcacatccttagaggagctagggagcagggaggagaagctgagagtgtgatcctgccaaggcccccaacgctgtcttcagcccacttcccagacctcaccattgccctcaccggtttaggacgaccacaacaggagagccatcgggatgcatcagtgccactgcgtccgggtcgttcttctgactggcaaccagccccactctctgggagccctcaggaatgaacttgctgaatgtgggaacagatggtcagagtccctcggggtacctcccatgaaaccctcatctaagaagtcacccacccacggacccaccccataactcctgcagaggctctgccctggctctctaggcctggagccatgctgctgggcactgaccctgcttttctgcatcgcagtccagcctcaggcattggggttttctgttgctacctagtcacttcctgcctccatggtgcaaaaggggatgggtgtgcctcttccgaggttccaccctgaacaccttcctgctccctcgtggtgtagagtgatgtaagccatccgatgtaggagatgataggcctggtatggaatgggggtgcccgccctccactcacctgaagtggccaaggtggtagaacatgggctgtttgtaaaacgtgtccttggtgatgtctacaatgatgggactgtcgacaaagttacgcacccaattgggtcctccttcggggttcagggcaaggttccagtcggtccagccgaccacatggtacaggaggttctagggtaaggacaaaggcaaagagacaaaggctcaacactgggggtccccagagagtgtaggtaagggtcacatgtgggagaggcagctgtgggtaggtcagccctgtgaggggcacattccttagtagctaaggagttgggggtgtgaagatccaggcatctcaaggggagctgagaagtctgaggcagctgcaagtgcctcagtagttgcaaaaggggcaatgaggtgtgcagacctgtgaaggaaagggaagatagggaatcatggttccccagagttgctcaaaagggcaggctagctggggaaagctggacaggaagggcttctgtcagtctttggtgaaactagtaagaggtctgaggtctgctttgcaggaagggagactggggtggcttaccgtgatgatgctgtggctgtactgcatccctcgatcccaggagcctagccgcacactctgctcccagaacttggagcccacacaggcctctgaggcaaagagcatggtgttggggaacaggcggtgtgtctcccctagggtggctttggctggagccagaaagtccaggtaccaatgtacagcaatgccatgaacatatttagctgcttctgggtctgtcagtacctgcaaaggaagagcaactgatcctggaccttgcacacaggcttctggaacttctagttcctgttgtaggaatcctggagttgggtgacgggaagaatgcaactagagaggtttggggagatttttttttgtttttgagacaggatgtcactctgtcactcgggctggagtacagtggcgcaatcacgactcactgcagccttgacttcctagggtcaactgatcctcccacattagcctcctgagtagctgggactacacgggtgccacacccagctaatttgtgtgtgtatgtgtgtgtatgtatgtgtgtgtgtgtatatatatatacatataaacacatatatatgtatatacacatacatacatgaaccaccacccccagcctagatagttttgttttgttttgtttcgagatggagtctcgctcagcctcccaggctggagtgcagtggcgcgatctcggctcaccgcaaccaccatctcccgggttcaactgattctcccttctcagcctcctgagtagctgggattacagacacccaccatcatgcccagataattttttttttttgtattttagtagacacagggtttcaacacgttggccagggtggtcttaaactcctgacctcaggtgatcacccgcctcggcttcccaaagtgctgggtttgcatgagtgagccacctcgcccagcccctagaaaggtttcaagcgacaactgtgggatccatggcaccctggaggtccaggggaatggtgctctaggaatccatagttgggtagagaaatcgctctaagtttgggagccagtcatttggatgctggatttgaaggtcactggagcaccatggaggtccaggccttaccacctttgcccagtggggcagcagcaagcgttggtcatccagcatgagtaggcggacattgtggtgagtactgttggcgagggtaggacctaggtcacgggcaatgaagtctcgctgatgttcaggggtgaagcccaggcactggaaggggtatccactcaacagcccagcagaaggctcattttcagctgtcactgcccagaactgtaacttgtgctcagcataggcatccaggaacctggcaagagaaaggtcatgaatgatccggccaagaaagtggaccagaccagctgggtgtggtggctcacacctgtaatcccagcactttgggaagccgaggcaggtggatcacttgagttcaggagttcgagaacagcctggcgaaaccccgtctctactaaaaatagaaaaatcagctgggcctggtggcaggcgcctataatcccagctacttggaaggctgaggcaggagaattgcttgaactcaggaggcagaggttacagtgagtgaagatggcgccacagcactccagcctgggtgacagagagagagactccttctcaaaaaaaaaaaaaagaagaaaaataaaaagaaagtgggccagaccgagagaacaggaagcctgatggagtgggcaagattgacaggcccaaggctgaaaggcccagaaggtagaaaggtgagctgaggacaggcagatctggaagtggaactaggttgagggttgggacacagatcagcatggctaaatgggaggccagtcctgatcccacatccttgctgatcccttacttcacaaagtatctggcccaggtctggtggtagatgtctccgggctgtcccttgagtgaccccttcccattcaccgctccattggtcttgagccaagtgggtgatgtccaggggctggcaaggagtgaaacgggacgctgggccaactgcagggctcggtgaatcaggggtatctagagacaaaggtagtgaagagagaagcacccagagttggaacacatactagcccaaccagtgcatccggttcagccattagcccccaccctcccacccccaggacaaaacagcaggggacaaaatgtctgtacaagcagacctaccctacagtttctcaacccccagacatcagggccctcagggcctgaaaaagctagaatgcctaccttgagcttggtatcttcctctgggaggctgaagttgtgcaactggaaatcatcaggggtgtctgcataggtgtaggtgcggatggagaagtcacagctggccatgggtacccggatgatgttatatccgattcctacagaaaaggatgatcaagatatggtagtccgagtcaataggagagtatgggactctgcttatcacttgccagtcctaatagtgtctgagtcagggccaaagggaacttgggctcctgggttggaacctgtggaggctggcacctgggtgaagcgcaggcctttctgagcctgagtccgtagcagttagcagatgataggcggcgaaatcttatttcacagggcattaaaacaggaaccaaatgtcagggatgggcagaagtcagggtccaaagaaagggcaaagaaaagtgtcagtggctcacgcatgtaatcccagcactttgggaggccgatgtgggcagatcacgaggtcaggagttcgcaatcatcctggccaacatagtgaaaccctgtctctactaaaaatacaaaaaattagccgggcgtggtggcaggcacctgtaatcccaggtactcgagaggctgagacaggagaatcacctgaacccgggaggtggaggttgcagtgagctgagattgtgccactgcactccagcctgggtgacagtgcgagactctgtctcaaaaaaaaaaaaagaaaaaagaaaagtgtctgctgggctcggtggctcacacttgtaattccagcacttcgggaggccaaggcaggtatatcatttgaggtcaggagtttaagactagcctggtcaacatgatgaaaccctgtctctactaaaaatacaaaaattagccaggtggtagtggcgcacgcctataattccagctactcaggaggctgaggcaggagaatcactatagcctgggaggcagaggttgctgtgaggggagatcacaccactgcactcctgtctcgccgacagaatgggcagagtgagattctgcctcaaaaaaattttaaaaaaagaaaagaaaaatgaaaagtttcaatggctctatgtcatcttgtccccttcctcctcaccttcttcagagaagtacgatttaagtagcaaattttgggcagggggtgacagggcaaggatgttgagagcagcagcatctgtcatggcccctccaaatcccttcactttctggaacttctgttctggctgcagggtcagtagcaggcctgaggacatccacagggaataagggtatcagtacccagcgggaaactccatggtgatcactgacaccatttacctctaggaggacccagcctggcccagggggtgaggggtgtaatggttacctgtgcccgtgtgattagcctggatgggccccatactcagctccatccgtcgcccactgcgtgtactctcatagcggctgaaggtaccaagggcaggaaaggtcggggggtcaaaggagtcacagtatgtggcattgcagacacacaccaccgagctgtagccgaagcttttagggatgcaggggcgggcacctgggagggagggagtacaagcagagtgaggtctgatgaagacatggagaatggacacatctgctaggagagactgaacacggtttcaaaattcctcaccccttggccgggcgcaggggctcacacctgtaatcctagcactttaggaggccgaggtgggcggatcacctgaggtgaggagtttgagacctgccttgccagcatggtgaaaccccgtctctactaaaaatacaaaaattagctgggcgtagtggtggccgcctgtaatcccagctacctgggaagctgaagcaagagaatcgcttgaatctgggaggcagaggttggaatgagccaaaattgcaccactgcactccagcccaggcaacagag

SEQ ID NO: 94444 - DNA, 24542 bp, Homo sapiens
cagtactacaggtgtgcaccaccatgcctggctactttttaaatttttatttattaaaaatatttttttcctttctttccacaggtgctgactttttatttttgtagagactggtgtcactctgttgcccaggttggtcttgaacacctatgctcaagtggtcctcctgccttggtctcccaaaatgccaggattacaagtgtgagccatagtactggcttcaaatttcttaaacactcctataaacaccataccccgaacccctccttgagaacatacctgggtagaacaccctttgtcccattgtccacagcaaggatgtgcagtagctgttctgtaggtaagttcccctaatgtatgctttggcctgattgccctggcatttagtgcttcattcactggaatcccaaccagccccatcttgggatggtttggggcatcctttgtgagtgctgccctgatgccacttttggtgtgacactagctgtgggttcagctgatactaactggtgggattctctggaagggctttgatagcatcatcatcatcatagcattcattagttaccatttgcccattccccactgtccaatctttatcgagcacctacgctgtatcaggccctaaggacacagtagtgagcaaaacagacagggcctttgccctctgtgagatttacagtatagtggggagacagactatcaacaagtatcagagaaataaatatgtaactacaaaccttgcaagtgctactaagtagtggatcagggtgctggaacacagaagccagtgggagaagagagagggtgtattttattttatttatttatttttttggaagcggagtttcactcttgtcacctaggctggagtgcagtggcacgatctcagctcactgccacctctgcctcctgggttcaagcaattctcatgcctcagcttcctgagtagctgggattacaggtgcacgccaccatgcctgacctagaggatatattttagacaagatgagatggttgaggaaggcctctttgaagtgattattttgaagctgaaatttgaaggatgagaaggaaccggtgggggcaaatggagaaaggggttttccatggcggcggggcgggggcagaaataatatatgccaaggctctgaggaagaaaaagcttggtgccaaggagacaaagagctgcaatgaggctgagtgcctggagtgcagggtcgtggcccatagtgaagataggggacctgagcaggatcttgtaatgtggtggatttacccaggggatggacatgatccaactgatggtttaggtccctcccgctgctgggtaaagaatagatggtagccgggagcggtggctcacgtctgtaatcccagcactttgggaggccaaggcaggcggatcacctgaggtcaggagtttgagaccagcctggctaacacggtaaaacctcgtctctactaaaaacacaaaaaattagccaggtgtggtggtgcgtgcctgtaatcccagctacttgggaggctgaggcaggagaatcacttgaatccgggaggcagaggttgcagtgagccgagatcatgccattgcacaccagcctgggcaacaagagcaaaactgcgtctcaaaaaaaaaaaaaaaaaaaaaaaagaacagatggtaggtacaggcagaactactgcgggcttaggaagaatctaggtggtaggtgatggactagcatgttggcagtgaagacgaagagagggggacggcttggagatgcattttggagaagagccagcagagtggaacggcaaaacagccgtggagagggcggcttctagtgtcgaggagtctggcttgagcagttgggtagatggtagcgccactaactgagactacggaagaaataggtttgaagtagggggaaattcaagctttctgttttgacaggctaaatttgagaagccagttaatcattaaaatccatagtcagacagttggagctgttcatcgagcacacttcctgtgtgctggaacagcattcatgcctcatggacaccatctccttttatcattgtgacaacctagaaagaaggtaggatcaacaggctgttttacagatgagggaactgggccgtagcaaggtgtgttccttttccactctgctgtggggccaggaggctgacggctttgcacagtggcgtctgtagggtttggagagtggcacccataggagatgagatggagagggtgaggttgagcatttacctccccagttgccattctagggaccattctctccctatcccttggaccttacaggggtaacaaagcccactgttattagatctggggtaatgcactatccgttgtgctttaccaacaccctgcccattcctttgtataatcctgttatgaaacaccttcaaattatcccatttaagagaattctttatttcctgaagaaaccctaccgaatacacttgtctgatgcaaaaagtcttgtcaggagtggagctgggattcaggcccagatagtggagctccagagcccgagctgtaaccactaagctccatgcctgccccttgggactgtttcagtgggtgggaaagggagaagtctctgactctggagttggaaaagaaagagagagatagtagagaggacttccggagggaaatgagcatggggcctcatctttctgtatatagaagacacaacaaataaagagagacaaaatttgtacccacagagaatgtggcagacttcagggactggggattcaggccttgtgcttgtggtgttggcagagacatgggactttaaggatggtctggcattactttgtttttgatacagggccttcctctgtagcccaggctggaatgcagtatcatgatctctgctcactgcagtctcaatctcctgggctcaggtgatcctcccacctcaacgtcccaaggagtcgggactacaggcacgcaccacaatgcccagctaatttttttttttttttttttggtattttctgtagagatggagtttcaccacgttgtccaggctggtgcagaactcctgggctcaagtgatctacccgccttcacttcccaaagtactggaattacaggcatgagccaccaygcccagctgtggtctggcaatattgaactgactccagaaccagttgggaggataggaatcccagatatcccagtcccaagggattagcaggaggtggggggcagttctccaaagcagcccgtgtcctgtccagctaagggacagacactttgacctgaaatcaggccagtttcctcagcagtctggctgaccctggtccacaagtgaccacatgaagcatggtctgcactttgtcacaggatcatccctgagcaagaggcctgtgggtgagaaacagaagcccagcatccaaacacaacactcagctttgtcagttgagagccctccctcctgccacaaacacacatgctccaacagccacactcacacatgcacagacacaaacgcaggtggcttttcattccacaggcatggactgaacccccatatgggccgtgccccgacgcatgccagactggaggaggtgaggccactgggcccaggtctctgctcagtgtggggatggagacaggagcgaggccagtcaggtttaataaaggaagtcggggggcactgacagaactgtgctcagcacacagagggacaccaggagagacagagcattgtgagtgagggcagaaggaggtcagggcagcttaacagacgaggtgccccctggtcagacacatacacacacgtaaacatacacaaagctccccaccattccacacacacacacaaatacgtactccactctaacactcacacaatatccacactcacacatgcagatttatgtatccggaattggtgggttcttggtctcactgacttcaagaatgaagccgcggaccctcgcagtgagtgttacagttcttaaaggtggtgtgtccggagtttgttccttctgatgttcagatgtgttcggagttttttccttctggtgggttcgtggtcttgctggctcatgagtgaagctgcagaccttcgcggtgagtgttacagctgttaaggccgcgcatctggagttgttcattcctcctgtttcattcctcccggagcgatctcggttcaccacaacctctgcctcccgggttcaagcgattctcctgcctcagcttctcgagtagctggcactacaggtgtgcgccaccatgctgggctaattttggattttttagtagagatggggtttcactatgttggccaggctggtcttgaactcctgacctcgtgatccgcccaccttggcctcccaaagctctgggattacaggcgtgagccactgcacccagccgtgttttgtccaattctttgttcaagatgccaagaacctggacaccctccaccggtgacagtaccttatatacacggaatcatacagtatctgtccttttgagtctggcttatttcacttagcataattgtcagaggtgcgtgaaccagagcaactccatcttgaatagggactgggtagaataaggctgagacctactggactgcatttccagttggtttaggcattctaagtcacaggatgagataggagattggctcaagatacaggtcataaagaccttgctgataaaacagattgcagtaaagaaactggccaaaacctaccaaaaccaagatggcaacaagagtgacctctggtggtcttcaacgctatactcctaccacatgctgtgtcgacatcagggagttaactgtatatggtctacaaagcagaggcatgaataatccaacccttgtttagcttataatcaataaataactgcctgggccaagtggctcgtacttgtaatcccagcactttcagaggtcgaggtggctggatcacttgaggtcaggagttcgagaccaggctggccaatctggagaaaccccctctctactaaaaacacaaaaattagctgggcatgctggcaggcacctgtaatccaggagaatcacttgaacccgggaagcgaggttgcagcctcccacgtagctggaattaaggcgcggaccagcacacctgggtaatttttgtatttttagtagagaaggggttttgccatgttgaccaggctggtctcagattcctgaccgcaggtgatccgcccaaagtgctggaattacaagtgtgagactcatcttttttttttttttttttgagacggagtcttgctctgtctccccagctagagtgcagtggttcgctggatctcagctcactgcaacctctgccttacgagttcaagcgattctcctgcctcagccctcctgagtggctgggattacaggcgcgcgccaccacgcccgactaattttttttttttgtatttttagtagagacggggtttcaccacattggtcaggctggtctcgaactcctgacctcatgatccacccgcctcggcctcccaaagtgctgggattacaggcgtgagccaccgtgcccggcccaagactcatctttcttaagcccttaaagcactttgcacacattacctcatggtattaccaccctcattcaacagatgaggaaagctagtttcaagcaagttcactgaggatcagagacgttaaatgatttgcctaaagttagagaactaataagtgagaaagctagtcctgctgcgttttactaacgtgccaatcagctgcccaggaagataatgaaaacttgagtaagacaggcagccaaagccacagcggggacgttcccagcctggctcgcttccggcactgacgcctccagccgcgacctctagacttcagcccttccattggtcgtccgtcacagtgccacagtgcgccatgctcacacgacggccagcagccaatcagcgcggctcatcttcgcccagccaggacacgcaggatcgcgttatctgtccctcccgcgggcacattgggagttgtagtctaattatatatttccgcccttagtgtggggagagcgggaactactcgacccacagagccgatcgcggagcggattctgcttttaggagtacccgccaacaagcgggaccgagcaggaatccgtatctgggaacaggtgagagaggatgtgtgctgggccttggaggaagggggccgagaccgggccttacttctgtaacgatactgtgaggcatcggaaggccagcctgttgtgtccgttttgaaggtcggtgggctagactggctggccttctaggggtgtggagacttcccaactctgcccttgtgctttcctggaatccccaatatgcccggaccccggtttactcctttgctgcgagcccttctctcccgtccagagttgctccgagcctatctgctcagtcctagcgattcctgtggggcttgggacgcgcggttcaagcaccccggaccatatggatgcagcacccatgggttctcgctccaatgcttctttcctccttggggcgtaactcagaccctgggcacccctctccactgcccaggggagacctgggttctagatttggctctgcctctactatcttyctacctcctagagcctcagtttggcttgtgtaaaataggatgacttaagggtcctttcagcccctaatcctggggtactttactctgtaccgcctccttacccagccttgtgcacgccatcttgaaggcactgagttctagcctgtttattgtaagtggtgattagttgggtctcagtcacccagccatacttttttgttccctgcgtatccttcctgtaattgtccccaagcacattccacaagagggaggggcactctgggctaaggckggggtgggagttatctggggagctgccaccatgcctctgcctttggtgcttgcccctgcagggagtgcttagtgccccctccctatgccactcccaggatgcccctgtcccgctggttgagatctgtgggggtcttcctgctgccagccccctactgggcaccccgggagaggtggctgggttccctacggcggccctccctggtgcacgggtacccagtcctggcctggcacagtgccygctgctggtgccaagcgtggacagaggaacctcggtgagtgtggttggggtgaggggccttggggaggggagcagctgatcaggtttctgacttgtttttcttctacttagagccctttgctcctccctcagaatgaacggagaccagaattcagatgtttatgcccaagaaaagcaggatttcgttcagcacttctcccagatcgttagggtgctgactgaggatgagatggggcacccagagataggagatgctattgcccggctcaaggaggtgagggattcatgacttgggggagtaaggctttggttcagttgctctgtacctgtgtggcattcacctgtggcttatgggggacttttgacagatgtgagagaaagctttttttttttttttgagacagagccttgctctgtcacctgggctggagtgcgatggtgygatctcggcttgctgcaacctccacctcctgggttcaagtgattctcctgcctcagccttctgagtagctgggattacaggtgcgtgccaccacatccagcaaacttttgtatttttaatagagacggggtttcactgtgttgaccaggctggtctcgaactcctgacctcaggtgatccacccacctcggcctcccaaagtgctgggattacaggtgtgagccaccgcgcctggccgagaaagcttttacctgagggactcgagtctgctctggagaggttggggcctgggcaagtatacttactcagtccatcaaccggacttttggctctgatggaaggtgggtcatccaaactgctttgctttgggggtggaggccttgaacctggcaagtcttagattttgtgtcctgaaatcagaagctgttaggttggcagagaccggggaagaaggcagtctgatattgtcctatctccctggggcctgagtgaagttattgtatcattagaaacccctattctagaacatgaactattgctgtgatacttgccaatttttttcctgttgattctggagtatctattaaaattctttttataaatgctgtctatctcatatatctcaggggaatgaagggaaaggggggctttgcctatactggaatggggattaaaagagtcttggcccggcatggtggctcacgcctgtaatcccaggactttgggaggctgaggtgggggggatcatgaggtcaggagttcgagaccagcctggtcaacatggtgaaacccccgtctctactaaaaatacaaaaattagctgggcgtggtggcgcccacatgtagtcccagctactcaggaggctgaggcaggagaatcacttgaacctgggaggcggaggttgcagtgagccgtgattgtgccactgcactccagcctgagtgacatagcgagatgaagtcttccctgttagttaggtctgattgatagccaggcagcagaaggcaaagtgagatgcaagaggagacactactggaggagtgggagatggatcccacagcgtgggtcccctgtaagctgtcttctggctgactttggagaggctttgttttaatataatgaaggaggcttttcatttgcaggagggttgaaccctggtaggcagaggtggctggaaaagtagggatgggttgtgaaggggaagtctaggagaggtggggatggggaaggaaactggggagggacctgaacaagccagtcatccctatagcatgtactgagttttccgtgggttcaagccctgttctgggtttgggagcagcatttaatctgcactatggaggttttaaatttattgggaggccaaggcgggtggatgacttgaggtcagtagttcgaaaccagcctagccaacatggtgaaactctgtctctactaaaaatacaaaaattagatgggcatggtggtgggcacctgtaatcccagctactcgagaggctgagccaggagaatttcatgaacccggagacagaggttgcagtgagccaagatcgtgccactgcactccagcctgggtaacagagagagaattcatctcaaaaaaataaataaataaataaataaataaaaacaaaaaataaatttactagggtagaccatgcagaaagaatgtgcctgggtactgggacctcttctagctttgctccagaaatttggggaaggagtaaagacagtagcaattccagaggctccttgaagaggagttggggttggggaggataaagttaggtggtggttggaaatgggagagagcaaggagaaaactcacagtagctgctgtatggaccctgataccctgtacctctttccttgccctccaggtcctggagtacaatgccrytggaggcaagtataaccggggtttgacggtggtagtagcattccgggagctggtggagccaaggaaacaggatgctgatagtctccagcgggcctggactgtgggctggtgtgtggaactggtgagaggggtagggcaagggagaagaagtttcctgcaatggtggtgacttgggtgggaaggggagggatgggcctgaaacttatttctgggttgtgtttgtgtttctttgtctctagtgtgctacggccaaatttagagtgaatcactccaagggttaactaatgtggggagcctcttttggcattaggtatgaagatggctgtagatagttgtagacagtgtggactggggcctcgagactgggcagagaggtgtcagctctttcctctgagcagaggatggctataaaagtgacagaggaggccgggcatggtggctgacacctgcaatcccagcactttgggaggccaagggggaggatcatctgagttctggagttcgagaccagcctgaccaacatggagaaaccccatctctactcaaaatacaaagttagctggatgtggtggcacatgcctgtaatcccagctactcgggaggctgaggcaggagaatcgcttgaacctgggaggcagaggttgcgatgagctgagattgcaccattgcactccagcctgggcaacaacagcgaaactccatctcaaaaaaaaaaaaaaaaaaaaaggtgacagaggtcttccaaaggctattcagaagcagagattgaaaactggcagctcactgacagtattttgaaaatgttttacaattaagtctcctaaatttaacaaagagatttcacactaaaacctagatttctagcatggcttgggaaattgtaagatttgggtccatgttcccgcatagcaacaattggctgaagctgagtggatgcaacttctgcaagacggcatgtgttctcctgtgtgctttctctagtttgctccaatccccacatccccttgtcttctataccagttcgtcttggtcttgaaggtgtctagtttgctggcatggcctaaagctttcattagtggcagggggactgggttctgggaggggtgccatgcccgaggagggtggcagtgagcccaaaagggaagagcattcagaacttggtgagtgacgatgatgctgagtgcctggcctgagaggagcagctggctcaagggaagacgtgctgagcacagtcagcccgggtacgttcttggtatgggtggagcaggtggatctgcctgtcctgtgggcggtggaaattccagtctggaacttgtcggggagatgggtctggagaatagagatttgcttccaaggaggtaataggcccatggcatccagggagagggccctggatgacagggatgctgaggggctgaggggttcaaaatatggagatgacaggcaaggaaggaagggaaggaggatgagggcagagcagaggagtaaagctatgggggccaagggaagcaagaccttgaggggccagtggttaactggtagaatcagttcattttttttttgagatggagtctctctctgttgcccaggctggagtgcagtggcaccatcttggctcactgcaacctctgcctcccaggttcaagcaattctcctgcctcagtctcctaagtagctgggattataggcacatgccaccatccctggctaatttttgtatttttagtagagacggggtttcaccatattggtcaggctggtctggaactcctgaccttgtgatccatctgcctcgccctcctaaagcgctgggattacaggcgttacaggtgtgagccactgcacctggcctagaatcagttcttaaccctagcagcaccctagtttcacctgtaagtttttaaaaatttttaattttttttttttttttgatacagggtcttactctgttacccaggctggagtgcagtggcatgatcttggctcactgcaatctctgcctctggagcggaagccacccttccaccgcctcagcctcccaagtagctgagactacaggagcgagcctctacttggctttttttttttagagactaggtttcaccatgttgctgaggctggtcttgaacttgtggcatcgagtgatctgcycatctcggcctcctaaagtgttgggattacaggcgtgagccaccaygcctggtctaaatttttttttagagacaaagcctcattctgttgcccaggcttgagtgtagtggtgcaatcatggtgtactgtagcctcgacctcctgggctcaagcgatccttccacctcagcctcccaagtagctgagactacaggtgcctaccaccacgcccggctttttaaatagttttttggtagagatggagtgtcactatgttgcccaggctggtcttgaactcccgggctcaagtgatctgcctgcctcggcctcccagagtactgggataacaggtgtgagccactgtgcctggcctgggttttttttttttttttaatttccctaataaatagaaagtgctggtggggttaagaatcagtgctaggaggcagaggaaatttggggaggccatggaattaattatcttggagaccatcatggttgagtggtggtggctgaaacaagattgtccttgcagtcacccttgggagaggcagtgaatgggtggcttcagggaaaccatgctactccaaataaacacagagtcaattaaacatgtgcctttgatgtggaaagcccaggacctccacactactcttctgagtttaggtcagaggtaaagatgcagatggatgcctccttccctgaggaccctgcctataacagcagtgattgcaacggtcctttccccacggcccatgctgggctctggcaggcggtgttgcatgcttcctttgcaatgtggatccactacagcacacaggattaggatgggataaagtcttaaaaaccatgtcttctaggccaagtgtagtggctcatgcctgtaatcccagcactttgggaggctgaggcaggtggatcacctgaggtcaggagttcgagaccagcctgaccaacatggggaaaccccatctctactgaaaatacaaaattaggctgggcgcagtggctcatgcctgtaatcccagcactttgggaggctgaggcgggcggatcatgaagtcaggagatcgagaccatcctggctaacatggtgaaaccccgtctctactaagaatacaaaaaaaatattagccgggcatggtggcaggcgcctgtagtcccagctatttgggaggctgaggtaggagaatggcgtgaacctgggaggcggagcttgcagtgagctgagattgtgccactgcactccagcctgggcaacaagagcgagactctgtctcaaaaaaaaacaaaaaacaaaaaacaaaaaaaaaattagccaggcgtggaggcacatgcctataatcccagctactcaggaggctgaggcaggaaaatcgcttgaacccgggaggcggaggttgcagtgagccaagatcgcgctattgcactccagcctgggcaacaagagcgaaactccatctcaaaaaaaaaaaaacacacaaaccatgtcttctgctcaagcctgggtgacagagtgagatcctgtctcaaaagaaaataataataaaaattaaaacctgggtatagggccgggtgcattggctcacacttaaaatcccagcactttgggaggccaaggtggatggatcacgtgaggtcaggagttcgagaccagcctgaccaacatggtgaaaccttgtctctactaaaaacacaaaaattagccgggtgtgatggcacgtgcctgtaatcccagctacttgggaggctgaggcaggagaatcgcgtgaacccgggaggcggaggttgcagtgagccgagattgcgccattgcactccagcctggacaatgagagtgaaactccatctcaaaaacaaaaacctgggtatgtatctagaagtggaaaaacaaaaaaaggaaataagttatgaaaataaaaaccatgtcttgagctgggtgcgctggtgtgtgcctatatccctagattctcaagagttgagacaggaggatcacttgagcccaggagttcaagtccaacttgggcaacatgacaagacccttgtctctttaaaaaagcaacycaaaccatgtcttgaaaagctatttaatggtcagacacgatggctcacgcctgtaatcccagcactttgggaggccgaggcaggcggatcacttgaggtcaggagttcaagaccagcctggccaacatggcaaaacccagtctctactgaatgaaaatacaaaaattagctggcctagcagttggtggtggcaggtgcctgtagtcccagctacttgggaggctgaggcaggagaatcgcttgaatttgggaggcggaggttacagtgaacccacatggcgccactgcactccagcttgggtgatagagtgagactctatctcaaaaaaaaaaaaaaagaaaagctatttaaggaaccaaaacatagtttgactgactgcaagaagtatcacagggaatgttagagtgttttattaatttctttgtcagacaagtgtttaggaaactctcactccaggcctaatgctgtgctaggctctgcaaatgctaagagggggaagttactgtccctgcttccaaggagatcatggtctagtgggaaacccgacacgttcaggtaccttcagatgggcactcagaagagtaagcccttagttaatgtttaaagatgtttaaagatgtctgagactcataggtcaaagtcagatttcagttccaccttattagacctgcactgctaaggagctgctttaggtaaggctgtgttcctagtcaccagggtgttcaaacacagtgctgggggcaatgtgggaatagccttcttttatttaggaagtaatgtgaagtcagtttcatgaatagatcttactttaagcattcattgaggtttttggcaagaatagagtacggtatatgaaggtgtttcctaatctccctgacaccaggaataatctagggctcattagagatgtcaaagatctgttctagtttcttaacctaaaacaagagtgttttagttccattttataggcggggagtctgagccaaacatgttatgtcactttccaagtctccatagcacagaagtcttctgtctccccatcctgactttcccagctcatagggactgtcaaaggcagcagctctggccggctgtgatgcctcatgcctgtaatcccagtaatttgggaggctgaggcaggaggatcatttgaacccaggggttcaaaaccagcctgagcaacatagtgggaccctgtctctacaaaaaataaattaaaaaaaaaaaatagccaggcatggggtatgtgcctatggtctcaggaactcaggaagctgaagtgggaggatcacttgagcctgggagttagaggctacagtgagctgtgaytgcaccactgcactggataatagtgagactctgtcccctaccaaaaaaaagcaaaactatatacagatataaagtagcagctctgttgctgatagaaggaacagtaatgaggagccctgcaggtcttattccactctttctagctgcaagctttcttcctggtggcagatgacatcatggattcatcccttacccgccggggacagatctgctggtatcagaaggtaatgtgggcaggaaaatagcagtgggtatggggacaggccacagggaggtggttatatatggcctggttgaggtgttggggtgatggctcttagtatgaaccgagactagagattgattgcttgtttttctgtctgtcatgacagccgggcgtgggtttggatgccatcaatgatgctaacctcctggaagcatgtatctaccgcctgctgaagctctattgccgggagcagccctattacctgaacctgatcgagctcttcctgcaggtgtattgcagacagggcccgatgcccagagggtgcccatggtagccttggcctctataggacatgctcatctagctggtttcagggtacaggattgcagcrtgcctggaagggaaagaaagcgaggaagggtgttgggaagtggggttgtggtagtggcaagaaagggcttctctgtcctgtgtaattggaagaaagggtgataaaggactgtgtgtatgaatatgggccttaagttttggggctttctccccttctgttgcctttctgattctgcccagttgtcagctggtatgggatgttgggcttgggataccagggtttcgcatatctggagaaagcctggctcatggaccrtctttgtcttgcttagagttcctatcagactgagattgggcagaccctggacctcctcacagccccccagggcaatgtggatcttgtcagattcactgaaaagaggtgaggggaggtgagggacagcgcgaaccatgtctggacagcgagggagggctcaggatgtgcattgccctcctgaggagtttctcttctccccttactcaggtacaaatctattgtcaagtacaagacagctttctactccttctaccttcctatagctgcagccatgtacatggtgagtgagcctcctcacccctctctgctctgctgatgggggcttttggacagcaaggcatagagcagaaaacrtgaacactgctacccctggtgaaaaactgtgtgaccttgagcaagtcggtctcgctcagtctctttcctcagctggggataaaattcctacttcacaggactstaaagattaagcaaggcaagggatatgaaagtgcttagcacataataggggaacaatatatcctgtatctgagtatggataggagtgtggagatcatccaggttgagagggagaagagtggattaaagacagtcagtgggattaagtgtctaccctgaccttgcttctctacatttccttttcatcttgaaagaagttggaggtggcaaaaatattaggaaggtggatcagaatgacttggggactgacatttgtgagggaagagacaggctgtgcacctctagaatggattcatctcttttatgactcccaggaaggcctagccaaaaataagtgggattgaggttggaccatcagtcaggactgtctaggtcagggaagccaagatgtctgaagagagaggaaagatttggggctgcagtagggcaagaccccatgggaggaagcagccaggaagatgccggcacccctggggtttggcttattaacccccctttccctgcaggcaggaattgatggcgagaaggagcacgccaatgccaagaagatcctgctggagatgggggagttctttcagattcaggtaagaaggcaggaggcagtagcagagaacaggcaccagcttcactcctcctctgcccaggaacckcatccttcctcttttgctgccctccccctccctgcccaggatgattaccttgacctctttggggaccccagtgtgaccggcaaaattggcactgacatccaggacaacaaatgcagctggctggtggttcagtgtctgcaacgggccactccagaacagtaccagatcctgaaggtgcctgagagagggtggtgggtccctgagttggtggaaagggatagagcagtggttctcaactagaggcagttttcctcccgaggggacatttggcaatgtcagcagacattttttgymattgtcattacaactctgtgtgtgtgcatgtggtacagacatctagttggcaggagccaaagatgttgccaaacatgtagtacacagaacagctcccccagacaggattatctggtcccaaatttcaatagtgccaaggtggagaaaccctggagtagaggatgcctggtatgaggcaatatttgggatagggaagggaagcttgggattttagctacgtagagacacttgaaaattggagggaggaaaggagtgggtggctttggagatgttctggaatatgtgaatgaggggagtggaggggtcctggaggctctggggaaggccaagcccgttttcctgtctttcaacctcttccaggaaaattacgggcagaaggaggctgagaaagtggcccgggtgaaggcgctatatgaggagcwggatctgccagcagtgttcttgcaatatgaggaagacagttacagccacrttatggctctcattgaacagtacgcagcacccctgcccccagccgtctttytggggcttgcgcgcaaaatctacaagcggagaaagtgacctagagattgcaagggcggggagaggaggctctcaataaataatcgtgtaaccttcttgtggttctgttcttgctcggcccagccagagtctggctctttccagaatgtgcagggtggggtgctgggaggactcgctgcacggaaccaggacccaggggccaaaagcttaggatatatcaaaccckctaggtgggtgacaaaagacgctaaacgctgggggcgggtctgagctacgccacgcccatgcgcgaaggggtgcagctgcgcagcgcagggtaggttgtgctagtgcccctcccctcccgctctgtgccccgccgggcggggaccgtgggagccgcggacaagcccaaggccggagcggttccaggaggaccctggtgaggagggctcggcccatgggtgtagaccgatggacctgggcacgaggggcggggcaggacaagggagcaggagaaatgaatagagaaagggtgcggtggtggctgaacgatggagacgaatgcggagagaatggacataccgctgttccgaggggcgagggcgcaggctggagcccggccgaggcagccagcagatgcggagttgacaagctgacggctgctccatccttttcctctccagcccccacccctttcctgcattcaccagacaaactctgcgtattgccccacccccatcctccacctcctttcagggcatctgggtgggtctccctgggtcccttcctctgggagtaaggggtaggctggagggcagggccagattgcggcagcagggacctggaggtccattctgggcccggacctcttccaggcccccgccccccttcggagatccagagcgcagccgcgttctctgaccctcccggctccattcccggggggttacattcgactccatctgcaaacactgcagtggaaactaatggtcagtcgattgcgatttgcatctcattgaaatatcttccaaagcagccagagccttcaggcctgctgctgccgtcaagtcacctcggtgtccttccccgcagctcttgtcctcactggccgggcttcaccacctctrtcttctaggtctgcacctgtggttgccaggtaggtggatgtgagagaccctacccttctggktctctagaagccatcccatcgccgctagcatcatgctgtcccctcagagagctttactctgcaacctcaaccacatccacctccagcacgtctccctgggcctgcacttgtcccgccgtcctgagctacaggaggggcctttgagcacaccccctcctccaggagacactgggggcaaggagagcaggggcccctgcagtggcaccctggtggacgccaattccaacagcccagctgtgccctgccggtgctgccaggagcacggtccgggcctagaaaaccggcaggacccgtcacaggaggaagagggggctgcctctccctcagacccaggctgctcctcctcactcagctcctgctcagatcttagccccgatgagtcccctgtctcagtctacttgcgggacctccctggtgatgaggatgcccaccctcagcccagtatcatccccctggagcagggctccccactggcttcagcaggccctggcacctgctcaccggacagcttctgctgctctcctgattcctgctccggagcttcttcttcacccgatcctggcctggactcgaactgcaacgccctgaccacctgccaggacgtcccttccccaggcttggaggaagaggacgagagggcggagcaggatctccctacctctgagctcttagaggcggatgatgggaaaatcgacgctgggaaaacggagcccagttggaagattaacccaatttggaaaattgacacagagaaaactaaagctgaatggaaaaccactgaaaacaataacactggttggaaaaacaacgggaatgttaactctagctggaaaagtgaacctgaaaaattcgactctggttggaaaaccaacacaagaataactgattctggctcgaaaacagatgcagggaaaattgatggaggatggagaagtgacgtcagcgaggagccggtgccccaccggacaatcacgtccttccacgagctggcccagaagcgcaagcggggcccagggctgccccttgtcccgcaggcgaagaaagatcgcagtgactggctcatagtcttctcgcccgacaccgagctccccccctcggggtcgccgggcggctcctcggcacctcctcgggaagtcaccaccttcaaggaactccggtcccgaagccgggccccagccccgccagtcccgcctcgagaccccccagttggctgggctttggtcccgccccggcccccacccccgcctgtccctccccgaaggaagaagaaccgacctggactgcagcccatagcggaggggcagtccgaggagggccgggctgtcagcccagcggctggcgaggaggccccagccgcgaaggagccgggcgcgcaggccggcctggagggtaagaggtcgcaagaagcgggaggagggctgggcttcggccgctcacgcctcctaggcttccaacccggccccctgtcttccctccattctgtgtcacccatcctccccgccccttctaccagggagcgctccgggaaagggaaactgggtgggtcattgggttatgggactaactgtttgctccctcttcttcccgccccttcttgcctggctgcccatcccgctgccctccttccctctgcgcctggccccgccaatcccgcctgcagccggtcccctcctgctccctcggcccctggttttccggttctcggccgacgggcgccccctgttggagggtgggggcgcaggcgcagctgggtctctgctcctggctcctctggccgggtggcccggcgccgggctgcggctgctgggggcgccgagccccccagaggagcagctgctgcccgtccgcctgtccccggtgggagcctattcgcctccgactcggggagccttgccctgcctggccagccccgagctggcactgctgctgtccccgctctttcccagaagtagcaccttccccgccgcggctcccccaccccgccaggtacccgcccccccgctgccaccgcaacctcgtccgccgaaggcccctcgctggaccaggagcccatcgcctccgcccaggctacgtaagacggacccgggctagccccgcgggccacgcctcaggcgggccgccccgcccactctcgcccggccccgttttcgctttttttccggggttgcccagcttagtcccgcccttcagtttaagccgactccaagcaagtttgtcggccttggggagtctggccccgttcctagtgctggagggggaagttgttgcctttcctgctccgtgggccggccccctctccctccagacccacctgggcatagtggacgcgggcttacccagcctccatgccaagtctagggggtcccagcgagtctgttgttaggggctttgggtcacaccctctgtggaattccttggcctgtgcagctcgggcctgccccccgaccttgctagggaggggtggagggtgaagctcccgggagctcattggcactagaggttctggccacgccctctccgcgagtccagtcccacgcgggatgaagagggcaccctccgccaagaggctgctgcgggacccgggtttcccctttccggcgccttccagcctcccaatcctcgggtctcgcctccctccgtctcctccctttcccctgtctgtctttccattggtccatgccgcccacgtgctccccggggctccgcaggcaggactgggccccggggcggtgcgctgggctgcacctccctccccgcgccccgtcctctcccgccctacaggccctagcagggcaggcgggaggtgagcgcggccatcccgctcccggagttccgggatcctggaggtgggggctgtgccctgagggagggcacagggaaccgggatggggctgggggacagcgagtgctgggaagtgtgcgagatttcactccggggctcgggtcgagctaccccgtgcttcaggcggtcctgcgcctcctctccccaagacccttcggggacacagcactgcagacccgccggagacaacttgtgcgggagcccggagtcctcggaataacacttggtaagtgttaccgcgcccttcttcccttacgccagtccgtagttcgtggtccttcgccggtgtccccggagcccagcggctgtggatggcagaagcccagagtgggactggtcagctgcaggagcagaagaaaggtagggcaccctgactcccgaccccgcgcttccgaatgaactgcccttcgcccccggccctgctctcaggctgtccgaaggcagtctctccacgcccctcgggcaagcctgggtaggggcgcggcctcctagcgtcttccctttcccactcctcccaggtcttctgatagccgtcagcgyctccgttgataaaatcatctcgcatttcggggccgcccggaacttggtgcagaaggtgaaggtggctggggggaggctgttgggatgaggagagtaatggagctccgcggggggtgcgggaatggttggcgggaggtggctgggaggtgtctggagggatctctggagccatcggcatcgcgccacctccaggcccagttgggtgatagccggctgagcccggatgtggggcacctggtgctgaccaccctctgcccggccctccacgccctggtggcggacgggctgaagcctttccggaaggacctcatcaccgggcagcgcaggagcagcccctggagcgtggtggaggcgtcggtgaagccaggtgagccaggagggcgtgggacccggcagtgcgcagggcagggcygggcttggctgactgcaccccacgttctcaggctccagcacccgctcccttggaaccctgtatagccaggtcagccgtctagccccgctgagcagcagccgtagccgcttccatgcctttatcctgggcctcctcaagtgagttgccttctttccagtgcccttcccacgacctgggactgcaggagcgtcatgggtgggacacagtagtagtgcctcacatccccagagaaggccccccctcttccaatctcatctcccatcctccacccagagaggactggagtcctccacctccctgaacttccattccctcttttctcccctagcaccaagcagttggagctgtggttttccagtctccaggaagatgcaggtcagaggttcagatggtagaggatggggctgatgggctgggaggatgggaaggaaagagttctctcctgctggttcccactgctgccagaatgccattaatccagatctccgatcttattactcttctaattaaaactttctaaggaggcccatcgcccataggatgaaagacccaaagccttggctgtctggcctctgccctcttcccctgccttggagggtcttgccaacagtcttcccgcctggcccttcctgctccagggccctgcttatgctgttcctctaccttctgcccctcctgcttcctctgaactatcattcatcctttgagtccttccccagtgaggccctacctctaccctcggactaggccaacccccacgcctcattttgtatgtgcttctatggctctcctgtcctcctcctctgtagcctttgcactgtctctgttacttgtcaccacttgctgtgtgtgtcttcctatttgggctaggttccatgcaggcggggatgtcagtcctatagcccaccacatccttcctcctctctgccccagtgcccagcagagtgaggcctgggaagatgtgtgctgactggtgggctgctctggggggtcttctgggactaggtccagggcaggagctgatgttggcctgctcttttccaggcctgctctccctcctgtacctgccaacaggatttttctccctggcccgcggtggttgtccctccctgtccacagagctgctgctcctgctgcagccattgtcggtgctcactttccacctggacctgctctttgagcaccaccaccacctgcccctgggcccacctcaggcccctgcccctccaggcccacctccagctctgcagcagactatgcaagccatgctgcactttgggggccggctggcccagagccttcgggggacttccaaggaagctgcttcagacccctctgactctccaaaccttcccacaccagggagctggtgggagcagttgacccaggcctcccgggtctatgcctctgggggcactgagggctttcctctttcccgatgggcaccggggcgtcatgggactgcagctgaagaaggtgcacaggagagacccctgcccacagatgagatggcaccaggcaggggcctctggttgggaagactatttggagtgcctgggggccccgcagaaaatgagaatggagccctaaagtccaggtaatggggtaccttgtcctttctatgaccttctgactctctcagatctcctagcggcttcatttgaaactctctagtgatgatcctttagggcagagattggcggtctgtttttctacagccatgagctaaaaatggttacattttaatggttatgttaagtgcctacataatgatctcaattttctctcttggccctaggtcctaaaatatag

SEQ ID NO: 94445 - DNA, 89117 bp, Homo sapiens
  misc_feature (1)...(89117): n = A,T,C or G
aggaaatacagcagttggcaaaaagttcccccctgcccagcagatcaatttcaaaccctctggacttgccctctgttctctgactctgtcctatctgcctactctctaatcttgcctccaactgttcctccaagtgattgctcaataaatttgcttgtgaaatagaaacaaaacaaaaaagaccaggagagcatcagaggtcattatcagaatcaggccagaggacccagcaaaacactaagttgaagtgtgccaacccagcctcaagtgtagtcggtatgttgtaggccaagttgcagtattggtggaagtagtcatttagcagtagatatcctctcttggggagtctgctgcccagccaactgtttgggatgaggaatttgatggcctccccttttaggagggaagaattcagggctgtgaagtaggaagaagttgacagcagtattatgtgaaaatgctgtggaagtgttaggtctttggaggggtagagggccagaaagaatgatagttcttttaaaggaaaacagggaattgctgaacttgctcaaatctgatgtttcaggtggaaattggagagcactgtttgaagaggttagtgaatttgagagggtagctagtcacacttggagctctactttgaaacttctcttttagttctcatgtctggctgggcacataagcaatggccctttgtttcctcagcaggtagaacatgtccatgaaccaaggctcacacacgcagtacattcctagtgctgcttgccaccctagcctctgctttctttgggaggctttttgtaataggcctattacagaccggtggtaatggagaaaggagtgtgacattttaacctcttgtttatgttaatggtattgcagtgtcccatcatgagcatttcttgtctgatgcctttcttgaccatttctcctttgctttttgaaaagcaaaagctgtctacccgaaaccgtctctcagttgagggccaaggaagttgctgccagtgctgctgcaggggagtgaatcatcctgggcatccacatgcgagacccacccatctgtccacttttacagtaatcacattagtctcccatgtccacccaaacaccagggcagtggaaagtagaatgccaggaaggagagggttgggagtagtcttacccaggacaggggttgacttctgtaccagcatccagagaaggatcttggatcctcacctaagtctcccttggatgaggagctccaggaaggggacaggaaagtggttgttgggttggaaggtccttcttgttgctgctttacttccttcattttagctggtgcctacccattctgttatttcaaacccaggtctcgctcttcccaaggaagcgccccaatgcccagccagtaaggctggatttggtgttttttcctcaagtgttactgctcttgggcactttccatatagcatatgtgtttccccatgtggtctattccactgtgccttggcacagggcctggaacctagcagatgttcatatgtgtgttgggctaaattgaaagcagggagcaggagaggcaacagtggctggtttgtagtagtctcacgtggagaggtttaacatgaaagtgtagtctacaatttcatcgaggcagtatgtgtgtgtaagaaacattcattttgtgacaacaagatgcagtttgcacatgtcatttctgcttccccctttgctttcttatttctgatctttgattgggaaatataattgagatttgaattctctacacaaatgtcatcactcagcatgtctgaccaaggcccccaagctttgcatgctcccagaccattcaatgtagttgggagtatggaattccacggagttaggcagataagggtttgaagaatagtatcttccacaagataaccattgacatccctattttgcagatgtgggaactgtggctcagagaagttgcatccataaacatagagctacaggatttaaagccagtactgcctaaatgcaaagctcatacttttaactgcctgctcctgtttttctgcttatttcttatatacccatgggcaaatatttataacttctcagggcttcaatgtctcatatttagaattaggggagcaaaggctgggtatgggggctcatgcctgtaatcccagcactttgggaggctgaggcgggtggatcacgaggtcaggagatcgagaccatcctggctaacacggtgaaaccccatctctactaaaaatacaaaaaaaattagccgggcatggtggtgggcacctgtagtcccagctacttgggaggtggaggcaggagaatggtgtgaatctgggaggtggagcttacagtgatccgagattgcgccacactgcagtccagcctgggtgacacagcgagactccgtctcacaaaaaaaaaaaaaaaaaaaaagaatttaggggagcaaaaattctcatatttagaattaggggagcaaaagtctcgtagagttattataagggagaaaggaggtaatgtaaaaaacaatccatacctcatacctggaatagtagtagtcatagtaaaagcagcagctgttttttgtttgtttgtttgttttttaaatatagtgtttactatgtggcagacattgttttagttctttctttctggtgtgtgtggtttttttttttttttttttagacagggtcttgctctgttgcccgggctggagtacagtgagtggcgtggtcatggctcactgcagcctccacctcccaagcttaagcaatcctcctgccttagcctcttgagtagctgggactacaagcacaagtgcatgacaccatgctcattttaatttaatttagtttattttctttcttttttttgagagatggggttttgctatgttgcccaggctggtctcaaactcctgggctcaagcaattccctgaccatggcctcccagagtgctgggattacaggcgtgagccacacttggcctgttttagttcttaatttaggctatcttataaaatcatcaccacaacccttagaggttactacaattgttctcctccagtccgtttttaaacatgaacagaaagatataataacgggcatagctggagttcacactccatcagtctggctccagtgtccttactgaacccctatgccatgttaacttgtggcaaacattagttttgaacttcatgctgttctagaatctggcatcaacatgaaagggaccataaggaaactggagtagtaatatgacaaggaggaggccataccaagctatggaaggtgagcagtaacatggatactcacaattccctgattcagccagtgagtggtaagacagcccatatgttatttcttagtggtggctgagtgcataggatgatgacccatggtacatcattcttttggcctagggaacatcagcttacaggttcattcatcaagacttaatgacagccccacctctctttaccaaaggctctcaggttgaatgtttcttaccccaaagacacttgactacatactcatagaaaaaaagttgaataaataaatgggaggccgggcacagtggctcactcctgtaatcccagcactttgggaggctgaagtgggtggatcacttgaggtcgggagttcgagaccaccctgaccaacgtggagaaaccccatctctactaaaaatacaaaattagctgggcgtggtggcacgtgcctgtaatcccagctactcgggaggctgaggcaggagaatcgcttgaacccgggaggcggaggttgaggtgagctgagatcgtgtcattgtattccagcctgggcaacaagagtgaaactccatctcaaccaatcaatcaataaataggacaattcttccctacagaaaaattccaaataataaatgtagaaggaaagaggaaaatagaaaaccaccattaacataccacagtaataattggctctaggtaagacccaccgatgaacattaaaattagtgggtgaggcttggtgcagtggctcatgcctatactccaagcacattgggaatgtgaggcagaaggatcacttgaggccaggagtttgaaaccagcctggccaacatatcgagaccttgtctctacaaaaaagaaaaaaaaaattagctgggtgtgatggcatgcacctgtagtcccagctacctgagaggctgaggctgggagatcgtttgagtccaggagtttgaggctacagtgaggtatgattgtgccactgtactgcagcctgggcatcagagcaagaccctatctcttacaaaaaaaaaatagtgttaaaggtcatgagagaccagaatagactgagaagctgccatagtttagaggagactaaggtgacatgacagctaaatgcaacatagtatcctggatggggtcctgtaacagaaaaaaggatattaatggaaaactggtgaaatcccaataaagtctatagttaaaagcaaacaataagccaccagccctccaaccccgccgaccccaccaaaaaaaaacaaccaaaaaaaccccacaaagttcctgggtccttcctgcctgagatccaaatggcattgtctagagcacctcagttctggcatttatattctagttctgaattcttgttacctttgggaaagaccttttggttgtgtagtgcctgtgtctgggaggctctgatgaatttggggacaggcttgtggtctatgtgactctcaaagcctgcctacccagtgaacagaatgctactcagcaggctgaggacaggggtatgcacatggatccgcctactccaaccccagtccttgctggtattggatgttacaaatgacatcccctggacccccaacgatctttttttttttttttttttttttttttaagagggagtctcattatgtcgcccaggctggagtgcaatggtgtgatcttggctcactgcaacctccgcctcctgggttcaattgatgctcctgccttagcctcccgagtagctgggattacaggcgcccgccaccatgcctggctaatttttgtatttttagtagagactgggttttgccgtgtttgccaggctggtctcgaactcctgacctcaggtgatcctcccgcctcagcctatcaaagagttgggattacaggcatgagccaccgcgcccagcccccaactatcttttaaggcattacctttagacattctgcttatctttcaaggcctgactcacattttacctcccatatagttccttcatgatcattacatgtattagtatctttcaaattcctgtgatgtcttcaaccttaaagttctttatatctgttgatctgcccttcctgtgatatatagcacaccttgccatgttgagtctgtgtttgtacatgccctgtctccctaagcagaacacaaacttcttgaagggaaggagtcttacaaaaccttctaaacttcatgaggggaaggaatcttacaaatatcccttgaagcgtctaggatattgcttgccataagccctcatgaaatgattggcaagtttgagtgagtgaatgctttaagacagatgagaggtgaatggacttgcttagagtcataccactgggtatgagctatatttggagcctagctgctcagtttgtccctttctgagcattctgaggccatgaaacttactaactctgatcatagcactaaactacagtaatagtgatggctatcatttgttgtgggcttactctgggccaggcttggttctaggcatgcacgctatgcagtcctcacaatagctctgaggtatgggcctcactatcctcattttgtagatacatccactgatgttcagagagatataaagaatttgccttagattaccagctaataagttgctgagttgagatttgaacccaggtgtgtctgtcatccagactcattccccctcacccctataaagcaatgtctttccccttgttttttcagacccatccctggaaggcatgtgtggcactgagcatgcccagttgggagaagatgggcagcagccgccgcggtgcacttcaactacctcatctcagtctgagccttcagagcagcttaggcgccaccaaggcaagaacctagcctccgaggaccccaaaaagaagagagctcagaagccctcccacatgagaagaaacatacggtgagctgtgctctgtgtaagaggagagggaaaggaatagagattttaccttcatcttaaggctgtcaatagcaaaaagactgatttgggaaggacagttctctctccaaaggagaaaagtgtcaggtgtgtgtcttcattaatagtgaaggtgcagctcaggatcactggacttgggcattcagaggactgtagggagaatgagaaaggccttgaccactgctggagggtcttctactctctggaggccccaggtggcagcccgaagatgatagggtgctctgagctggactttccggtttttcctctatttttccttttgtctcaaaacaagaggagactttataaagttgagttctcatcttcttagacgtcaacttcaaatggtagaggactgtctgacccaaagcaagactccttctaagagcaaaaatgtgaacttctttaactatccaaatccccaacagttcttccttccatcaaataacaatgcgtgccattgaaaagaaatgaatgatatctttttctcctcctgcctccacttaaaaaaaaaaataacgacaacttgaaatattactctgagtttgaaaataatatagaatccctgtaaccctagtttcttttcttttcttaattwatttatttattttttttgagataaagtctctctctgttgcccaggctggagtgcagtggcgtgatcttggctcactgtacccccacctcccgtgttctagcggttcttgtgcttcaacctcctgagtagctggaaccataggtgcccgccaccacacctggctaatttttgtatttgtagtagagacagggttttgccacgttggctgaactggtcttgaactcctggcttcaagtgaactgcccaccttcgcctcccaaagtgctgggatttcaggcatgagccactgtgcccggccaatcctaatttcttttctacatgacaacactatttttttttcttgagatgaagcctcactctgtcacccaggctggagtacagtggtgcagtcttggctcattgcaacctctgcctcccaggttcaagcgattctcctgcctcagcctcctgagtagctgggactacaggtgtgcaccaccacacctggctaatttttgtatttttagtagagacggggttttgccgtgttagccagactggtctcgaactcctgacctcaggtgatccacctgcctcagcctcccaaagtgctgggattacaggcgtgaaccaccacacctggccaacaacactatttttaatactgcttttcagctttgtgaatcaaatattactctagtttattcttgatctgttatgtggagagatgagttggcaggtcggggagttaaataatatagaaagtattagcctagagccatctgagtttgatatcctgttttttgaatgctgctccttgcatgggtatggtggggctgatgtggcttctccttctcccgcctcgactctgagatcatcaatggctatttctctctttagcttgccattacattgcccaaatcttaattgaacccaagtgctgtctcttatgtgaatgtttagaaagctactccgggaggatcaattggagcctgttaccaaagcagcacagcaagaagagttggaaagaaggaagcgcctggagcagcagaggaaagattatgcagcccctattcctactgttccgctggagttcctccctggtaagcagtggacatggcagggaaggccctttgcttcaggaggaagaagccctaggtgcacacagtggtcaaaagcagatctggaataagactgtggcctctcggctgggcgcggtggctcacgcctgtaatcccagcattatgggaggctgaggcagatggattgcctgagttcaggagttcgagaccagtctggccaacatggtgaaaccccgtctctactaaaaatacaaaaaaaaattagccgggcgtggtggcgtgagcctgtaatcccagctactaggaggctgaggcagggggaatagcttgaaccagggaggtggaggttgcagggagctgagactgcgccactgtactccagcctaggtgacagagtgagactctatctcaaaaaaataaaaataaaaataaaaataattgtggcctctcaggaatcctttaaagtcattcagcttcttgagagcacacaatcagaagaagatcatttaaaaagctaaaatgaataaaaatgtactctttaaataggttttatctagatttttcctcataactttggattttaacttaccaaaggattgggaccttttctggtggtcaggtggatagcaggaaggaaaaaccagtagagaaagggaatttggaaggagggctgaggtttttgagatgggctctgcttctcttctcagtggatactccccatgagagctataaaagaaaaggggtggtgaattgttttgggaaatatgttagagccaaatgtggtcttgacaccgttcccttccattttgcttttcctagaggaaattgctttaagggcaagtgacggtccccaactgcctcctcgggtcttggcccaggaagtcatttgtttggacagtagcagtggcagtgaggatgaaaaaagcagtcgagatggtaagatcaaaccaggtgcctccctttcttccgacctggtgttcatgctgagatcggctatactttgaaaagagtccagtccttcctccttcaatttgggatgtggctttgactaatttccctgtgtctccttggtaaatataagttttttgcttgtcttaacttgaagctgaaagagagaaatagtaaaagtcaaaattttaataagtgttgacaagttctaactttaagtttctgtagtcttctgctctgactgtgtgcagtaaattatcttcactccctggatttttggttttgcttttttttgctgtctcagaggtgattgaactgagctctggagaggaggacactctgcacattgtggacagcagtgaatctgtcagtgaagatgatgaggaagaagagaagggtggcacccatgtcaatgatgtcttaaaccagcgtgacgcccttgggcgggtccttgtcaacctaaaccaccctccagaggaggaaaatgtcttccttgccccacagttggcacgggctgtgaaacctcatcaggtacagcaaaccttgactgttttctccttttcctttttgtttccttgttgtgaacattgcctgctggtggttattagcgtcacagcctgtgaagtacttgtttggtaccaagagcagcttgttcagctgttggaaagacctgatacttccttctagcagttgatgtttcaggattcctgatgaataggaagggacagggaaagggaagagacaagcttcaggtttgccctactccgtagaaagcactggatctcttgacctaataatttgagcctctttctgtgggatcccatgactgaggtgctctctggtgagcagtgctttgattaggaaggtctggatctagaagagatgtgagagtcagaagatggggggactttctggtatgagggagtagagtagtttgtgttgatccagagcctggaaccaggactagtgagtagaagtaccatgaagacagacattgactcagtttacgattaagaactcttttttttttttttttttctcctgagacagggtcttgctctgtttctcaggctgggactataggcctataccaccacacccagccaatttttttttttttttttgtagagatgaggtttcgccacgttgcccaagctgatcttgaactcctgagctcaagcgatccacctgcctcagcctcccaaagtgctgggataacaggcctaagccattgtgcctggctgaaaactctttgtttttgagacaggctcttgctctgtcgcccaggctggagtgcagtgatcacgactcactgcagccttcactccctgggctcaggtgatcctccacctcagcctaagtagctgggactacagcctcatgccaccatgcccaactaatttttaatttttttgtagagacgaggtctcactatgttgcctagtccggttttgaagtcctgagctcaagcagtcctcctgccttggcctcccaaagtgttaggattacaggcgtgagccaccatgcctgacctgtctaactgtatttttgtacccattaaccaacgtctcttcctccccctcctctcccttctcagcctctggtaattaccattctattttctacttccatgagatcaacttttttagttctcccacatgagtgagaatgtgtgatatttgtctttctgtgcctggcgggtttcatttaacataatgacctccagttccatccatgttgctgcaaatgacaggatttcatttttcgtggctgaataatattccattgtgcataggcaccacattttctttatcctttcttccactgatagacacttgggttgattacgtattttggctattgtgcataactcagcttaaaaactcttctgttgttgttgttgttgttgttgagacgaagtctcactctgtagcccaggctggagtgcagtggcacaatctcggctcactccaatctccgcctcccaggctcaagcgattctcctgcctcagcctcccaagtagctgggattacagttgtgcaccactgcacccggctaattgtttgtatttttagtagagccggggtttcaccatgttcaccaggatggtcttgaactcccaacctcaggtaatctgcaacatnnnnnnnnnnnnnnnnnnnnnnnnnnnnnnnnnnnnnnnnnnnnnnnnnnnnnnnnnnnnnnnnnnnnnnnnnnnnnnnnnnnnnnnnnnnnnnnnnnnnnnnnnnnnnnnnnnnnnnnnnnnnnnnnnnnnnnnnnnnnnnnnnnnnnnnnnnnnnnnnnnnnnnnnnnnnnnnnnnnnnnnnnnnnnnnnnnnnnnnnnnnnnnnnnnnnnnnnnnnnnnnnnnnnnnnnnnnnnnnnnnnnnnnnnnnnnnnnnnnnnnnnnnnnnnnnnnnnnnnnnnnnnnnnnnnnnnnnnnnnnnnnnnnnnnnnnnnnnnnnnnnnnnnnnnnnnnnnnnnnnnnnnnnnnnnnnnnnnnnnnnnnnnnnnnnnnnnnnnnnnnnnnnnnnnnnnnnnnnnnnnnnnnnnnnnnnnnnngttcttaaggctgggcacgatggctcgtgcctgtaatcctggcgctttgggaggccgaggtgggtggatcaccagggcaggagattgagaccatcctggccaacatggtgaaaccccgtctctactaaaaatacaaaaattaggtgggcatggtggtgcatacctgtagtcccagctactctggaggctgaggcaggagaatcacttgaaccggggaaatgggaggttgcactgagctgagattgcgcctttgcactccagcttgggtgacggagcaagactccgtctcaaaaaaaaaaaaaagaactcttagcaatagggactacttctatgtggctgggcacagtggctcatgcctgtaatcctagcactttgagagaccgaggggggcaggtcacctgaggtcaggagttcaagaccagcctgggcaacatggtgaaaccctgtctccactgaaaatacaaaaattagctgggcatggtggcgcatgcctgtaatcccagttactctggaggctgaggcaagagaatcgcttgaacccgggaggcagaggttgcagtgagttgagatagcaccactgcactccagcctgggtgacagagccagactctgtctcaaaaacaacaacaaaaacaaactactcctatggaatgggctgccttaagagggtgagctttccaatgctgagggaagccaagctgactgaaagatcctgtcaggaatttgacactaccgattcatgcattacatggggtgttacactgtactagtgaatccttttctgttttttccaagaggactgtcaccagcaaatagatcagtcaaggtacagggaatcttctatggccatccacacctgctatctattataacgccttctcacttacttaattcttactaattacaaagtgagtaaaaactggagccctcatctttgtgagcccctctgacatttgtctttgtcccttgtcagattggcgggatccggttcctttacgataacctagtggagtctctggagaggtttaagaccagcagtggctttggctgtattctggcccacagcatgggtctggggaaaactttgcaagtgatctctttcatcgacgtcctcttccgccacacgccagccaaaacagtccttgccattgtgccggtaagagtttttgggaaggcaccacttaagtcactcctgaagagctctgwgttaatgcctttactgggcaccaaaaagcttgatgagctcagctctgagtttgttccataaaactctctttttggacttggctttctaataggttaatactcttcagaattggctggcagagttcaacatgtggcttccacctcctgaagccctcccggctgacaacaagcctgaagaagtccagcctcggttctttaaagttcacatcttgaatgatgagcacaagtaggtggcctgccctttcctctctgcccctttccttttagacttctgtccgtgatctgatgttaaggcagtctctttgagtgtgtagcctgtgcatctagatttgtttttggtttcctgatgtatcactttctctgttcttgctactcatttttttctctacctagcttttcaggaaagccagagttaagtagcctgagaaatttcctgtgttctgctttaggaggcttttatatcttgaaaaatatgtgggcatggtcatattttcccatgcatatcgtagtaaaattcaacacgaaacaatggatctttccactgtctgatttttttttttttttttttttttttttttgagacggagtcttgttctgtcacccaggctggagtgcagtggtgcaatctcagttcactgcaacctctgcttcccaggttcaagtgattctcctgcctcagcctcccgagtagctgggattacaggcacccatcaccatgtccgactaatttttgtatttttagtagagacagggttttgccatgttggccaggctggtctcgaactcctgacctcaggtgatccgcccaccttgtcctcccagagtgttgggattacaggcgtaagccaccatgcctggtctctactgtctaattttttacttattacatttcacttttcttaaaaacctaatcattagtcacttcttttaagcactggtctgcaattgacctttaatggtacaactcccaaagctttgaaaggtgtcagccttgctttgttttaratttaaataaaattatctatatatgtatgccataaagtcaacctgatttccaaaagtctaaagctatttcttgatccaacaaaccagctctacatgctaacctttcccctcattggtgtggataattgagaaagtagactttactatatttttttcagagggtgccttttgtgatgtttggacacacacataaaaatgaggagatgattagttgacctcacaggtggttgctcattcaggacttttagtccacatgcaatcagtgaaatacagtgagtgctccggtgtttggaagtggagtgacttactgagggtcatctggtctcttctcctctttcctctttactgtttgtggctctttattcacttgagtccaggcaagtaaactgcagaatgttgcccttccttctgtgaccttgtatttatcatgggattgaaatgctccttcaaatgttgagttgtagtcatgcctgaatatccaagggggttgtcattttctcttgccttatgtagttgaattgctatgtttcttgctgtttaaccaccatcaatgatccagttcatcctgagtgcaattagtttctctgggatgatgggaggttcttgggtggtaggctacccctgtgcttgctgccacatgaaatctttggtaataagaagttctgaatgtacatcaacacagctttgattgtgagcaattcttccttgggagcagcagaaacaataattcttgagatataattcacatctcacacaattttctctgttcatcttgcaggacgatggcatctcgtgctaaagtgatggctgattgggtgtcagagggtggcgtgctgctgatggggtacgagatgtacagactcctcactctgaagaaatcatttgccacaggtagaccgaagaaaaccaagaagcgttctcacccagtcatcattgatctagatgaggaagatcggcagcaggagtttcggagaggtgggcagcctatcccaggaatactcttgttggtgtttcaggaaaaaagaaatcatgtctactaatagcacctagtcagatgtaaagtgcattattgatgtgaattgttatcatggaccaaaaatcctggttcccaagatcagtaggatgacttccaatggctctgagaaggtactgctttctctgccagctgtgcagttatggttaggccaggccacacactggcttgggggagattcctctgttcgtctatccctgtttctcttacagaacagttggaatagtaaccatttcctttaccactttctagagatgttctgagaaagcatgaagaaaatataaagtgtttaaatcactaatataaagacaaagtagtaatactattgtttgtgaatttataaaaaagaatttatcccagttgtttttagtgaaaaccattcctgtcatagttctaattctactccatcttctaaggggcctttgctcatttggggaagaatgtttttaagggttcagaggccatttcactttagaagtctcttcatctatgagattatgtttgttctaggtttgcttctatggtagagctgggatgaatttgccatttagcaatgactggaaaataactgcgggaagaccctgtcctttagctagctcctaccagccagccctcagatggagtcaagacgctggcaatggtgagagcctactaaagtgtctggattattcctattggtttcatccaggtgcatttttaatcctaggctggcactctgtaaggtccctctctctgctgcccagttggtctaagccctaggaatgcaagtcagttatacttttcacataaagaaaaataaagtaaggaaaggaacggaacgggggaaagggatatttattgcaagagtcaactgccagaggcagatcatgaggtcaggagttcgagaccagcctggccaacatggtgaaacmccatctctactaaaaatacaaaaaattagccaggcatggtggcgcatgcctctaatcccagctacttgggaggctgaggcaggagaatcgcttgaacccgggaggcagaggttgcagtgagcggagattgcgccactgcactccagcctggacgacagtgtgagactctgtctcaaaaaagaaaaaaaaagagtcaactgccagattagcattcataccaagtcataccagtcatatccaggagcttgaatggctggcaccctctcaccaaggggggctgactcttgctttcctgcttccttcatttcttctgtctcctccagggtgcacccctacttctcatattattgactaagagcaggccctgtcaccctctgactccggatcctcttccctccctagagtttgagaaggctttatgccgccctggccctgatgtagtaatctgtgatgagggacaccgcatcaaaaactgccaggccagcacctcacaggctctgaagaatatccgctctcgccgccgggtggtgctgactgggtaccctctgcaaaacaacctcattgagtactggtgcatggtggactttgtgcgcccagacttccttggcacccggcaggagttcagcaacatgtttgaacgccctatcctgaatgggcaatgtattgacagcacacctcaggacgtccgcctcatgcggtaccggagccatgtcctgcacagtcttctggagggctttgtgcagaggtgagccatcctcagggtcctgcttcctgaattttcagagggccctgttgccaagggcatgccaaacctgttatacaggatagggtgttggagtaggagggccccttccctggggcagtagtaaaactttgcttcctgtgacaagctagcagatggtggatatccactgtttcagttctctgaaagtttggcctagaagtgcttctctcaaaagttatctttaaaggtactggagacacctgtcttacttgctgagagaagcaagaaaaaggtaccattctgctgacttaccttaggctagtctaaagcagacccctcatttttccttgttgagatggcatatggagcgaaagctcagagaggcagcccaaattaaagtaagaacctcaagttcccctgtctctgtcatgcagtcagacttgacctgggacaggtcactctgcctcttagtgttagttttcatccttaaggtgagtttcttcttggttgttgaaccactctgcattattgcaaggctgcagtgcatgttgagatcctcaagagggaggtgtggcaggagtgcaaaaggctctgtttttatcttgtgctgacccctcctggccacactaccttgccgtttctgttctgtttgcctccataggagaggccacactgtgctgaagattcatctccctgccaaggaagaaaatgtgatccttgtgcggctctccaagatccagcgagatttgtatacacagttcatggatcgcttccgggactgtggtagcagcggttggctggggctgaacccccttaaggcattctgtgtgtgttgcaaggtgcattggggcctcagggaagattgagatggggactaaggatacacatggtcccaagggagttactcctactgagagycttcaataaagggagaataaagtgagagggggccacctsagttcactgcactggaggtttgggggctccaaggagagaggtgatggttttgtaccacataactcctgggggtgccattcacacagtgtaatataactgatgccccctgcagtgtgcaactcagctgcacaacttgttattccaaggggattaatggaaaaatactgtggggcagcgtttttgactgctagcataatcagaattcaagagatatatagcttagacaagttattaggggtaccttccattggattccatacttaatcagattgagacctctctcattcttttcttgagggacctgtttcattgacttcatacctctacccctggctactcttcagcagacctgttaggtattattcttaattgaccactgctttaataagtcagcagaaggtatgtgtctggggacaagaggggtttccaaatatttcttttatagccacagtcctgggtcaaggccaggaaactaaggcaagcgtggtctgtgatgatgctttggtatcactgcatccttccttcttcctttcctctcttctcctgggagttctcaactcttgctaggaatactctgtgaaatgatatgtgattggtctactataagtcagatacattttgtctatagttttatacagtagcagactgtagccacactgtgaaactggaacattcttactcttatttgaataagaatgtcaaaaaggcttgtgacagcttttttgattatgtatcaaacatacttactggcatggctcctggtatgcatgctgccattcatgtgtcatggtgaccagaactgataatcaaaacaaatatgcaggccctttggctgtgaagggctctgactttaatttttggtgtgacagtgtttattgtgggacgtgtgtgtttgagcaagtatgtgtttccagactccctgggacacccttggaatgttttttgtcctgtgtctcctctccctttccttgaacctcagatctggaatcaccctgatgtgctgtatgaagcccttcagaaggagagcttggccaatgagcaggacctagacgtggaagaacttggctctgcagggaccagtgcccgctgtccaccacagggaacaaaaggcaagggagaggatagcaccttggcttcctcgatgggagaggcaaccaatagcaagttcctacagggcgttggcttcaaccctttccaggagcgaggcaacaacattgtcacatatgaatgggtgagtcaagcagatccttcaggaaccataaactattgctgagaagggatggtgcaagccctgcctggggaaggggtagggatgcatggctagggtctctgtatggaattataaaggtggccagtgagctgctgccttggaaggaaataattttatttctagtgatctggccttggacctgctctaagctgccttgtttctctcttgcaggccaaggaccttctgactaattaccagactggagtcctagaaaactctcccaagatggtactgcttttccacctgattgaggaaagtgtgaagcttggggacaagatccttgtgtttaggtaggatgagaaacttccatttgaggctgtgtgtctatggtaaagaatgacaaaaccaccacagagcaagaccaagaccacccccgcctcccccaagtgctattgtgaggaccttcttgcatgttgtctgtctcttggagtttctttcattgcccaatttgatttctccacagagaacaatttagaaccctaggttagcactggagtctaatctttcaaattctggcctgtttttgtttactttgagagctaaggatagtttttacatttttaaaaggttataaaaaacatacaaagaatatgcagcagaggttctatgtggccaagaaagcctaaactatttgctatctgtccttttacagaaaatgtttgctgacccttggtttaatcttctatcccgccccaaccttttattttagttttaagctttgtctttaaagccaaataagtgatgtagtttgctccggagttatattctcagtctggctagagctttgagtctcattaaggcttgactccccaggaaaacaaagttgattgcttctccttctttataatctgaccagattatgctccaagaagagccaagtggcaggagcctggctcaggagcctcagagtgagggcttccacatgtgacacactttgagaggacagcagtgattttagcttggggagagcctagtgttgattttatggatcacttctaaggacactggctctcatggtatcttggaagcagtcgagtgattttgtctctctagtaaaacccataatcatatctgatgtatattcatgcagtggtagtgtttagtgctgaatgctatttgttactctgcattgagctaaaccccagaaattttcagctgtggaagtgaagaatgaagagagtattttttcagtgtggtggtagtcgtaagtatgtggatgactctgctcccattatacgctaggaaggatacccttggttgttcttggtatagttacctctttctgtttctttttctttttctttttttttgagatggagtttcactcttcctgcccaggctggagtgcagtggtgtgatcttggctcactgcatcttccacttcccaggttcaaacgattctcctgcttcagcctcctgagtagctgggaccacaggcacgtgccaccatgccaggctaattatttttggatttttagtagagatggggtttcatcatgttggccagattggtctcgaactcctgacctcaggtgatccgcccgcctcggcctcccaagtgctgggattacaggcgtgagccactgttcccgacctagagttacccccttttttttttttttctcctgagacagagtttcactcttgttgcccaggctggagtgcaatggcgtgatcctgcactacagcctccgcctcctgggttcaagtgattctcctgccttagcctcccaaatagctgggattacaggcgtgtgccaccacacccagctaatttttgtatttttagtacagacggggttttgccatgttggctaggctggtctggaactcctgaccttaggtgatccacccgcctcggcctcccaaagtgctgggattataggcttgagccaccgtgcccaacctagagttacctcttttcagtggtaggttgtgggagctcccattgtcagaaagttgcacaagagtatggacctattgggaacaatgttccctcaattctgggagccatctgaacgaaatgttttctgtttcagccagagtctttccaccttggctctcatcgaggaattccttggaaaacgagaagtaccctgtccacctggtaccgaggggcaaggagcacagaagtgggttcgaaacatcagctacttccgtgagttcattgttgcgttgttcttgaagccttggcaaggtctgcttaagggtttcctttccttctctctctttctctttctccactccatcaaatgcataggaatatttgtgattagtcaaggagcagggggatactaagagccagctgttgtttacaaggtactgtactaggggctgggggattgagagagttgggagagtgtagagaaatagaagccatagtccttctcttcatctgagatgtgacaattcaagaacaattgagtgcccctaactggggttctaaggaggatagaatcactgtggtgaggatgattagctaaggtgtctcaaaaatggggaggatttgaatacacagggctagtgttgcctgaggatcattccaggctgaaagatcagagtgaacacaagcctagatcatgcattctctgttggggagataatactttaaggggatgaactttttttttttttttttgagcagggggtggaaatcttaacttttaaaatgtgtaagtcaagtacatacagtacgtaaacagatatacagtttatctgtggtattaaatttcatgaaggacatagtgtcattgggaaaaaaaaagtcattccttagtggggtggtaatgaaaaaaaagttgagaaatacagacctcagcactgctgacatttgggccagataattctttgttataaggggctgtcctgtatattatacgacatttagtagcatgcttggtttctactcactagatggcagtagtatctctcagttttgacaaccaaaaatatctccagacattgcaaaatgtcccgtggggagtgggagtatggagaaattgccctcattgagaaccactgccctaatagaaggatttagagaactggaggttcagggagtagcaagaagacccccagcacaaggtgtggctcagagcttgccctatgaatcagtggtgagctgtgtttgggaactgtttgaactcaggttggaaaagtaggttggggtcctgacatagaaccccagtaccaagcaattaaactgttgcttcctacaacagtagtaattcagttttccatgtggtatttcatgcccttagctttgccatttactcaagatgacaagtgttgccattactatttatgcttcttaactgaagtcttttttttttttttttttttttgagacgaagtcttactcttttgccaggctggagtgcagtggcgtgatcttggctgaactgcagcctccgtctcccaggttcaagtgattctcctgcctcagcctcccaagtactgggactacaggcacaggccaccatgcccagctaatttttgtatttttagtagagacggggtttcaccatgtgggtcaggatggtctcgatctcttgacctcgtgatctgcacgccttggcctcccaaactgttgggattacaggcgtgagccactgtgcccggccctaaagcctattttttctccctctttggagcttccctcctttcattcatgtgttccatcctactgttccagatgtatttcctttatgtctctttacagcaagttcttagcttcaggagctggttaaaaatgcagattcctggtggaggaacatcatccatatcaaaacccttagtcctgcactcaccaggactcacaaggctgaggcagagaggtcaccttgagccagtattttccaaattccctaggtgattactatacattccgaagtctaggattcttggctttagaattgacctaagatagtaaaggggagaaatgtagtttataatccatggtgcatgtgagaatcacctgggggtattttcaaattatagatgcctgggccttacttactgtagacccatgatacgtccaaggggtgagatctgagcactgttgtatttctatttgttttgctctttaaaacatatttgcccagtgattttgctgtatatccttgctctaatatatccactgcttatggttttccttccttcctagggctagatggtagcacccctgcctttgagagggagcggcttattaatcagttcaatgatcccagcaacctcaccacctggctgttccttctctctacaaggtgagtggatcccaagaggggaggtcaaaggaatctgttcaggcagttggccacctgggctggtaccccaaaactccaagttccctcagaagagatcagctcaggtttgtaacttgtttctggggtcagagagggaacttcaaaaggaaattaggttagcagggcagtcatgatagtatcataaaattttttgagaccttcattaacaatggttgtggctcatgcctgtaaccccagcactttgggaggccaaggtgggaggattgcttgaacccaggggttcaagatactgagaccttgtctgtacaaaaaatcaaacaattagctgagtgtggtggcatgcacctgtggtcccagctacttgggaggcagaggcgggaggatggcttgagtctgagaggtcgaagctgcagtgagctgtgattgagccactgcaatccagcctaagcgacagagtgagaccctgtctcatttaaaaacaaacaaacaaatgaacaacaacaamaaaatacccaagagttttaattagcttttctctcaggagtgttatgaggcttagatgatgtgatgaatatgaaagtgctttaaaaagtagaaagtgcaaggtgactgtaaaaggctgatggtattgtctcatgccaagcagcttgaaggctgtgctgccttctgccatcgtaatgcccttggcaggatgtaagccagtcattcccctaagctgttagactaaaaatagtggaaacatctgtgtgcagaagtttcccctcaccaaggaacatccctccaaggccaggatgcgggggccttacttgttacagaggagagtgagttttgtttctgagctggtagacactttcatgttggatttcagggcacaattttcagtgcttgaggaatgtactgtttatcagcaggacagcaaaatccttgagtatgttgtacttagggcttaggacagagtaatattggggtagaagtcacagagggcaaaactgatttgaaaaycttttttaagactaaaggctctgtgattgttggcttgtcttttaaagggccggatgcttgggtgtgaatctgattggtgccaaccgagtggtggtgtttgatgcttcctggaacccttgccatgatgcccaggcagtatgtcgggtataccgttatggccagaaaaagccctgttacatctatcgccttgtggctgattacactctagaaaagaagatctatgaccgtcagatttccaagcagggcatgtcaggtgggccatcttccagacttyggagaggcacatctatacaggctaccatccttttagtatcaagggtgggagaggagcaggatatgggaacacaggcaggcttcgagaaagccagcatttcctcctatctcattctgattcaaattgcttaaaaggtaattgacctcaacttgttgaaggtgagtttaatgataacagccaagctcgttatacaagttttccccttatatgatgtttccagtgtcaccagcacctcagacctagtctttgactttcagatatgggatgacttttcattattagtgacctttacagtttttaatgccatgtgctgactttcttcatgtctttatccttctagatcgggtggtggatgatctaaatccaatgctgaacttcacacggaaagaggtggaaaacctactgcactttgttgagaaggagccagctccccaagtttccttgaacgtaaaggggatcaaggagtcagtcctgcaactggcctgtctgaagtaccctcacctcatcaccaaggtaagaacttggtatgcatgcaatccccagagtggcagtctctctgtcaaaggaggcttgtcttgtaagcttttttcttcatctgaggtgatgtttcatgcaggtgacttggactcaaggacttctttttcttgccccactcagtccccctcccttcccacaaccacttaccccgtcctctaatctggtcctgggagtgctaaggttagccatgtatagtaatttggccagtgagtcttcttagcagaaagagagggggaaagttctaaaaatgtagtttgttaattctctgaactcccccattcttttgatagggaaggcagacttagatgtctaaagctggtactaggttagagctataaattgtactcttgacagaaagacagtaaacctgcctgtgtatctctgagcagtctcttcgctagtgctggagacagccagctcttttcttggtcctaaagtaaggctcattatctatcagccatgttggtaactaaatcaacatcctcctgtgtccccaggagcctttcgagcatgagtcattgctcttgaaccgaaaggatcacaagctaaccaaggctgagaaaaaagcagcaaagaaaagctatgaggaagacaaacgcacatcagtcccctatacccgcccatcgtatgcgcagtattaccctgccagcgatcagagcctgaccagcatccccgccttcagccagagaaactggtgagttgctgaaaggggagggtctgctgctgggccaggcacaaacacctttcaacttgttcatattttaaataaaggcagagcctacaacttgttccttgactgctgtgaattgacaggctctgctctagggtaggtgtgaaagcagttcagtagccctggtgttttaaatggttctggttttgactgccctagctggaaaagtgagctgctggcccgtgacccaggagagtctttctggacacctgggtaggagacggggataaagcttcccagaaagaggcccagccattccacacaggtgcatctgacccctagcaccttagtcctaggcctcacttagaagtggtgttcaaggatgaaggctctgttcccttggattacagtcagggaatcctgctgctcctaaggggattccattctgtgtctgtgccatgatctggaaccaaaaaatctcttttttgagtataacatctagacttgttcagaatattaacagaatagaagccaagtgctaagcagtgagagaggctccttgtaagatattatagaacagttatctaggtttaattttttttttttaatttcaagacagtgcctcacagctctcaccctccacttactgatcagatctgctacctgattcagtagtttgcatttttaattatttgattatcttgaattaaaaataattattttatttgatgggaacagatttaaattttctctttctttttttgtgacagggtgtcactctgttgcctaggctggagtgcagtggtgcgatcacagcttcctgcagcctcgacctgctgggctcaggtgatcctcacacctcagcctcccaagtagctgggattacaggtgtgcatcaccatgcctggctaattaaaaaaacttttttggctgggcacagtggctcacgcctgtaatcccagcaatttgggaggtctaggcgggcagatcacctgaggtcgggagttcaaaatcagcttttccaacatggagaaacccccatctctactaaaaatacaaaaattagccaggtgtggtgctgtgtgcctgtaatcccagctactcgggaggctgaggcaggagaattgcttgaatctgggaggcagaggttgtggtgagccgagatcgcgccattgcacttcagcctgggcaacaagagcaaaactccgtctcaaaaaaaaatttttttttcttttagtcgagatgaggtctcactatgttgctcagactggtcttgaactcctgggctcaagtgatccttccatatcagcctcccaaaatgttgtcattacaggtgtgagccaccatgcccagcctaaaatttttttccttactaagactctcatgttaaaaacaaacaagctgcagctcccactgtgatcgacacagaagacaggtgatttctgcatttccaactgaggtacctgattcatctcactgggactggttagacaatgggtgcagcccacagagggcgagccgaagcagggtggggcatcacgtcacctgggaagctcaaggggtctggggattttcctttcctagccaagggaagccatgacagactgtacctggaaaatcgggacactgccacccaaatactgcgcttttccaacggtcttagcaaacggcacaccaggagattatatcccgcacctgtctcagtgggtcccacacccacggagccttgctcactgctagtgcagcagtccaagatcaaactgcaaggcagcagcctggctgggggagaggtgtctgccattgctgaggcttgagtaggtaaacaaagcagcccagaagctccaactgggtggagcccactgtagctcaaccaggcctgcctgcctctgtagattccacctctgggggcagggcatagctgaacaaaaggcagcagaaacttctgcagacttaaatgttccccgtctgacagctctgaagagagcagtggttctcccagcacgaagtttgagctctgagaatggacagtctgcctcctcaagtgggtccctgacccccatgtagcctaactgggagacacttcccagtaggggccgactgacacctcatacagccgggtgcccctctgagacgaagcttccagaggaaggatcaggcagcaatatttgctgttctgcagcctctgctggtgatactcaggcaaacagggtttggagtggacctccagcaaactccaacagacctgcagctgagggacctgactgttagaaggaaaactacagaaaggaatagcatcaacatcaacagaaaggacatcaacaccaaaaccccatctgtaggtcaccatcatcaaagaccaaaggtagataaaaccacaaagatggggagaaaccagagcagaaaagctgaaaattctaaaaaccagagcacctcttctcctccaaaggatcacagctccttgccagcaacagaacaaagctggacggagaatgactttgacgagttgacagaagcaggcttctgaaggtcagtggtaacaaacttctccaagctaaaagaggatgttcaaacccattgcaaggaagctaaaaaccttgaaaaaagattagacaaatggctaactagaataaacagtgtagagaagaccttaaatgacctgatggagctgaaaaccatggcacgagaactacatgacacatgcataagcttcagtagccaattcaatcaagcagaagaaagtgtatcagtgattgaagatcaaatgaatgaaatgcsgtgagaaaagtttagagaaaaaagagtaaaaagaaacgaacaaaggctccaagaaatatgggactatgtgaaaagaccaaatctacgtttgattggtgtacctgaaagtgacagaatggaaccaagctggaaaacactcttcaggatattatccaggagaacttccccaacctagcaaggcaggccaacattcaaattcaggaaatacagagaacaccacaaagatactcttcgagaagagcaaccccaagacacataattgtcagattcaccaaggttgaaaggaaggaaaaaatgttaagggcagccagagagaaaggtcgggttacccacaaagggaagcccatcagactaacagtggatctcttggcagaaactctacaagccagaagagagtgggggccaatattcaacattcttaatgaaaagaattttcaacccagaatttcatatccagccaaactaagcttcataagtgaaggagaaataaaatcctcaaatgctgagagatttgtcaccaccaggcctaccttaagagacctcctgaaggaagcactaaacatggaaaggaacaaccggtaccagccactgcaaagacatgccaaattgtaaagaccattgatgctaggaagaaactgcatcaactaacgagcaaaataaccagcaaacatcataatgataggatcaaattcacacataacaatattaactttaaatgtaaatgggctaaatgccccagttaaaagacacagactggcaaattggataaagagtcaacacccatcagtgtgctgtattcaggagacccatctcacgtgcagagacacacagaagctcaaaataaagggatggaggaagacctgccaagcaaatggaaagtaaaaaaaagcagaggttgcaatcctagtcgctattaaaatagacttcaaaccatcaaagatcaaaggagacaaagaaggccattagacaatggtaaaggaatcaatgcaacaagaagagctaactatgctaaatatatatgcacccaatacaggagcacccagattcataaagcaagtccttagagacctacaaagagacttagactcccacacaataataatgggagactttaacaccccactgtcaagattagacagatcaacgagacagaaggttagcaaggatatccaggacttgaactcagctctggaccaagcagacctaatagacatctacagaattctccaccccaaatcaatagaatacacattcttctcagcaccacattgcacttattccaaaattgaccacgtagttggaagtaaagcactcctcagcaaatgtaaaagaacagaaatcaaaacaaactgtctctcagaccacagtgcaatcaaattagaactcaggattaaaaaactcactcaaaaccacacaactacatgaaaactgaacaacctgctcctgaatgactactgggtaagtaatgaaatgaaggcagaaataaagatgttctttgaaaccaaagagaacaaagacacaacgtaccagaatatctgggacacatttaaagtaatgtgtagagggatatttatagcactaaatgcccacaagagaaagcaggaaatatctaaaatcaacaccctaacatcccaattaaaagaaatagagaagcaagagcaaacaaattcaaaagctagcagaaggcaagaataactgagatcagagcagaactaaaggagatagagacacaaaaaacccttcaaaaagtcaatgaattcaggagctggttttttgaaaagagcaacaaaatagatagaacactagcaagactaagaaagaagaaaagagagaagaatcaaatagatgcaataaaaaatgataaaggggatatcaccactgatcctacggaaatacaaactagcatcagagaatactctaaacacctctatgcaaataaactagaaaatctagaggaaatggataaattcctgcacccatataccctcccaagactaaaccagaaagaagttgaatccctgaatagaccaacaacaggctctgaaattgaggcaataattaatagcctgccaaccaaaaaaagtccaggaccagatggattcagagctgaattctaccagaggtacaaagaggagctggtaccattccttctgaaactatgccaatcaatagaaaaagaggaaattctccctcactcattttatgaggccagcatcatcctgataccaaagcctggcagagacacaacaaaaaaagagaattttagaccaatatccctgatgaacatcgatgtgaaaatcctcaataatatactggcaaacagaatctaacagcatatcaaaaagcttatccaccaagatcaagttggcttcatccctgtgatgcaaggctggttcaacatatgcagatcaataaatgtaatccatcacataaacagaaccaaagacaaaaaccacatgattatctcaatagatgcagaaaaggcattcgacaaaattcaacagcccctcatgctaaaagctctcagtaaactaggtattgatggaacgtatctcaaaataataagagctatttgtgacaaacccacagccaatatcatactgaatgggcaaacactggaagccttccctttgaaaactggcacaagactgggatgctctctctcaccactcctattcaacatagtgttggaagttctggccagggcaatcaggccagagaaagaaataaagggtattcaattaggaaaagaggaagtcaaattgtccctatttgcagatgacatgattgtatatttagaaaaccccattgtctcagcccaaaatctccttaagctgataagcaacttcagcaaagtctcagggtacaatatcagtgtgcaaaaatcacaagcattcctatacaccaataacagacagagagccaaatcatgagtgaactcccattcacaattgcttcaaagagaataaaatacctaggaatccaacttacaagggatgtgaaggacctcttcaaggagaactataaaccactgctcaacaaataaaagaggacacaaacaaatagaagaacattccatgctcagagataggaagaatcaacatcgtgaaaatggccatactgcccaaggtaatttatagattcaatgccatccccatcaagctaccaacgactttcttcacagaactggaaaaaactaaagttcatatggaaccaaaaaagagcctgcattgccaagacaatcctaagccaaaagaacaaagctggaggcatcatgctacctgacttcaaactatactacaaggctacggtaaccaaaacagcatggtactggtaccaaaaccaaaatatagaccaatggaacagaatagagccctcagaaataacaccacacgtctacaaccatctgatctttgacaaacctgaacagaaacaagaaatggggaaaggattccctatttaataaatggtgctggaaaaactggctagccatatgtagaaagctgaaactggatcccttccttacaccttatacaaaaatcaattcaagatggattaaagacttaaatgttagacctaaaatcataaaaaccctagatgaaaacctaggcaataccattcaggacataggcatgggcaaggacttcatgactaaaacaccaaaagtaatggcaataaaagccaaaatagacaaatgggatctaattaaactaaagagattctgcacagcaaaagaaactaccatcagagtgaacaggcaacctacagagtgggagaaaatttttgcaaactacccatctgacaaagggctaatatccagaatccacaaagaacttaaacaaatttacaagaaaaaatcaaacaaccccatcaaaaagtggttaaaggatatgaacaaacacttttcaaaagaagacatttaggcagccaacagacacatgaaaaaaatgttcatcatcactggccatcagagaaatgcaaatcaaaaccgcaatgagataccatctcacaccagttagaatggtgatcattaaaaagtcaggaaacaacaggtgctggagagaatgtggagaaataggaacacttttacactgttggtgggactgtaaactagttcaaccattgtggaagacagtgtggtgattcctcaaggatctagaactagaaataccatttgacccagccatcccattactgggtatatacccaaaggattataaatcatgctactataaagacacatgcacatgtatgtttattgcggcactattcacaatagcaaagacttggaaccaacccagatgtccatcaatgatagactgaattaagaaaatgtggcacatacacaccatggaatactatgcagccataaaaaaggatgagttcatgtcctttgtagggacatggatgaagctggaaaccaccattctcagcaaactatcacaaggacagaaaaccaaacactgcatgttctcactcataggtgggaattgaacaatgagaacacgtggacacaggaaggggaacatcacacactggggcctggcatggtgtggggggatgggggagggatagcattaggagaaatacctaatgttaaatgacgagttaatgggtgcagcataccaacatggcacatgtatacatacgtaacaaccctacacgttgtgcatgtgtaccctggaacttaaagtataataaaattcaaacaaacaaaaaaacttgacaaatgaggttccaaaggaaattttggaaaacttgccaaataagtctcatgtaaggttttaggtaagacattgacttttatgagtggatttgttgtcttttttgggggtggggtacagagtctctgttgcccaggctggagtgtaatggtgtgatctcggctcactgcaaccttcgcttcctgggttcaagcagttctcctcccctagctacccaagtagctgggattataggtgcacaccaccacgcgtggctaattttttgtatttttagtagagmctgtgtttcaccatgttggccaggctggtcttgaattcctgaccacaggtgatccacctgcctcggcctcccaaggtgctgagattacagacataagccatcatgcccggccatttgttgctgtttgtatagcaaattgaagatacttttaagtagaaagtcactttcttactagacatggtggcacatacctgtagtcccagcctcttgggaggctgaggtgggagaatcgcttgagtccaggaattggagaccagccttggcaacatagtgggactcaatctcaaaagagaaagtcactctctttcaaaactttcaggctttatttctgtcatttcccaagatagtattgctcaggaatggtctcttctcttttcctccacccattcctccctcttttttttccccctcttttttgggcttttctgtgtaacctcaggagtggactaaacctgagcccagtgagagaaaagccacatggagagaagatgtgacaaatggtccagactagctataaggagatgtcagctttgtttctggcttagctctggccctgtgggggcaccaacttctcacagcatttgatgagttcatgatcctgctgagtttttttaatccacatgggtacatgtgaggaatacttcttacccaaattcttagtcttagcccctgcagggtatgcggcttgggctgggtttctgttacattgatacctgaccagggcctctaactcctgccaaaccatcctaggaagacactggggaaacaggccagatagcacaggtctggggcccatctgggaacttggaggtccacagggaccaaggggctgaccaaaggggcctttaaaaacctaagagcaatgtgattgaggcatcatgcagaccagctccaacagcagagtggtataaaagtgttattttatgtgccaatcttcagtcagatgaggaagaacataacagtcttaagggtttttttttttccccctccaggcccaaagacgaaagatgcagacttcagaaagcttgtagacagggacttttcaaaaatcttaaatcagtagaagcctggcttttgtacacactgctttggtggctgctgcttttgttgttgtcatgactggaggggcactttgagggttgttccaggctggagctaggaagaactcaatgaaaagtaatacagaagagagagagaggtgtctgtattacttattgagactcaaggtttcagagagaaagtaaagatgtttaaagttggaacagactattttttaggatcacctaaacgtgtcgttacatggccctttttccgtgggtgagtggggaaaattctgcccatctcaacttaacatacgctgtggtctggtgaacttttcctgccttattgcatcttgacagcttcctgacttccctttagggactaactcctaatgtagatagtccaggttctagaggagcaaatattgtctcccatctccagaaagtattattccaccaacatctgattctccttagactttgacagactttatccctctgcctcttttgctgcaactgagtcctgccttctagtctccttttgaattgaccagaccctgcagattcttctgatccttctctgagcatcaactgatggtgtagaatggggcagcctagaaaggctctgtagcctttggaaaaggtaacagttgttctgccaaactcttttagtgtccttgtctttctcttacaggcagccaactttgaagggtgatgaaaagcctgtggccagtgttcgtcctgtgcagtccacccccatccccatgatgccccggcatgtcccattgggaggaagtgtaagctctgcctccagcacaaatccatccatgaactttcccatcaactacttgcagcgtgcaggagtccttgtgcagaaggtggtcaccacgacaggtgggaactcctgggctctgtggcagagctgctgtcccttttaaaattactttgttcatttaggaagtatctattaaacaccttttgtatttctggccttactacatttggcactcttggtaaaaaatagggaagacaacagtccctggtcttgaggaatttggattctagtgaaatatcttaagaataacaacacataactgggttttcttgggtttggtgggtgagatagactctgagcactgcaggaattgtggaaatgtcactggaatacagggttggtctcaggttcttatagaggtgtgaatatgctgagccctgcctgattgtagacccatctgggtataaaagacagctgtcaacctttgtacataatgagaagacctgaattgtcacttgcgtctacctttgcgagtttgatataaattgagcatggtgggccagtcagcagtggtggcaggtagccaacccatccactccaggagctggttctgtgattcagtgtgattaggaaggaaaacattttgtgatcctgttttttatcttgttatttagcaatatttataatatataaattgattattatttttttttttggagacagagtcttgctttgtcactcaggctggagtgcatgatcttggctcgctgcactcctgggctcaagcgattctcccgcctcagcctcccgagttgctggaattacaggcgtgtgccactatgcccggtgaacttttttgtattttaatagagatggggtttcaccatgttgcccaggctggtttcgaactcctgagctcaggcaatccacccgccttggcctcccacagtgctgggattacaggtgtgagccattgcacccggccaatatataaattttaatgaaaatatcttaattgatttttctaagtaaaaaatttgaaacacatgaaaagaaaaagagagcgccatataattctattatctactaattcttgaaaatactgtttcccaggtgtggggtaatgccagcaaggaagaagattaggccatttttggagcctaaagtgatgtggcgcagatgcgtgcaaacagtttggggaagaggaaaaaaatgcatagaaacaaccatctaaactaaaacatttttcacaccaaaaactatgaatttctaattaaataaagggaaattgattgcaacgatgaccagctcagatttctgacaaagttcctgttttcatagtattctttgtttagataattgtgaaagatcctgcttgcttcaccttccttggttctggacctctgccccactgagaggctgtagggaaaccaatgaagaactggggtagatgtgggactttgcaattttcccccctccttcagtcaggccccgtgcaatctaaatttaagatctgtgtttttcctagatattgttattcctggactcaacagctccacagatgtacaggcaagaattaatgctggtgagagcatccacatcatccgtgggacaaaaggtaagagcctgaccaaggacctgttccctgcctttggttgagagtgctgggctgggaagaagaataaatacatatgacttgagctagacgggtcataggaatcatcccattaggatgtcacattcyggaactgaatgagaaaatagcatttgtaggagcttaggggagttgggttgagcccatagggtattagtcagtggtttaaaagaaggaaattagggtccctacatttctctatcttgctgtctttttttttttttttttttttttttttgagatggagtcttgctctgtcgccaggctggagtgcagttgcgtgatctcggctcactgcaacctccacctcccaggttcaagcaattcttcagcctcagcctcccaagtagctgggactacaggcatgcgccaccacgcacagctgatttttgtactttttttttttttagtagagatggggtttcattatgttggccaggatggtctcgatttcttgacctcatgatccgcccacctgggcctcccaacgtgccgggattacaggcgtgagccaccgtacccggcccttactgtcatttttatgagaatcttgggatgggacaagtagacacaaggagaccaaaattggagggaaagagcggtggaatgggttataagcctacatacatttacccacttgcttggagcagggtgggggtcccctgataggatatgtattatgtggatgaattacacatgggttgcatgatagaatttttgcatatggtaatttaaaaagtccacatctgcctctgtcctcctttcagagggatatgagattggtggaataaaaaagctgggctaaacagtattgagacacaatctaagcctgtttttttcccctcttttctgcacccacgtcttctatccaagcctgttttacatattagcctttaaataagccccatgattgtgtgaggctctttgagactttttgttcagtaaggagattttgccctagcttctattgggttagagtacctttgaggttagggaaaaagtgccatgaaatacccagactcatagaaaacaccattcccagcctccttactggattcttcctagtctagaacccagccccctttactgctgtcttcctagtttatagctggggtcaccaaactctatgccccatgggtcaaatctagcctgctacctgttataatatctgcgagataagaatgggtttaacattttcaattggttggaaaaaaaaatcaaaagagtaatattttgtgacgtgaaattatatgaatttcacatttcagtgtccataaagattttttggagtacagtcatgccacgctatttttgtgttacagcagcagaattgaggagttacaatagagaccttatggcttataaagctcttacaaaaaccatccggctcttgtttttttttttttttttttttttttgaggcagagtctcgctctgttgcccaggctggagtgcagtggtgtgatctcggctcactgtgagctccacctcccgggttcatgccattctcctgcctcagcctcccgagtagctgggactacaggcgcccaccaccacgcccggctaattttttgtatttttagtagagatggggtttcaccgtgttagccaggatggtctcaatctcctgaccttgtgatccacccgcctcggcctcccaaaatgctgggattacaggcgtgagccactgtgcccggcccaaaaactatctggctcttgtaaaaaagtttgctaactcctggcctaaaggcagcactgacattcgaggaggttgatcaaatgacatacccaaggctgaagagaagatagattagtgccttgtgggaatagaatgcaggtctttcttgaattattcctactaggggagagaggatattgaagcagtaaggctccttcctcgcagatcaagaggagaacctgggccagagtgcctgggaacataggattccaacttactctcttttgtagcaccttatttgcttctccattgcattgaacccttcctgatattttctggtataagtctctgtctccctctctagagactaagctccatgagacagggcctttttctgccttgtgccttctagtgtctagaacagtgcctggcacatggtagtcatgtaatcaatgcttgtgaaataaatgaataattatgagtccatagctcagtcaccccacttcttatttcaggggtcttgggagatggtatacctaattgtatagctatttacaagcccacggcgcacagcctggagtttcccagggttggctgtattatatgtctgcctctaactgtcttcttcgtgtctattcttagggacgtacatccgtaccagtgatggacggatctttgctgtccgggcaactggcaaaccaaaggttcctgaagatggtcggatggctgcctcaggtgtgatggcttttactttccattttacttttcaaacaacatttgtttgctttgttttggttaggtattaacttattatgtgaatagataatatgtacatggttcacaattcagagtgtacagaaagaggtaaagtgaaaagtaagtatttttgtgtggtttttttttttgtttctttttgtttgtttgtttggtttattttttgtttgagacagggtctcgctctgtcgcccaggctggagtgcagtggctcgatcttggctcactgcaagctctgcctcctgggttcatgccgttctcctgcctcagcctcccgagtagctgagactacaggcgcccgccaccacacctggctaatttttttttgtatttttagtagagacggcttttcaccgtgttagccaggatggtcttgatctcctgacctcgtgatccgcccgcctcagcctcccaaaatgctgggattacaggcatgagccaccgcgcccagcctttttgttttgttttttttgtttttttttgagacagagtctcgctctgttgcccaggctggagtgcaatggtgcaatctcggctcactgcaacctcctcctcccaggttcaagtgattctcccgcctcagcctcctgagtagctgagattacagaagcatgccaccacgcccagctaacttttgtatttttagtagagattgggtttcaccatgttgatcaggctggtctcgaactcctgacctcgggatccgcctgcctcggcctcccaaagtgctgggattacaggtgtgagccaccacgccaggccataagtttctcctccaccatggtcgcagacatccattgctcctcctttttttgagacagagtctcgttctgtcacccaggctggagtgcagcagtgcaatctcagctcactgcaacctccgcctcccgggttcaaacgattcttctgactcagcctcccgattagctgattagctgggattacaggtgcgtgccaccacgcccagctaatttttgcattttttgtagagatggggtttcaccatgttgcctaggctggtctcgaactcctgacctcaagtgatccactcacctcggtcttccaaagtgctggtattacaggtgtgagccaccatgcccagccaattttctttgtttttttaaaacaaatgctaacataccataaaatactatttactccttttttcactcaccagtaatagtttattccttatcatttcttctagatatgtcttcttgaaggttcgcacaggatgagctgtaacacaatgtattaattagttccctgtcaacatacattttgattattttactccaccatcactgacagtgctttttcacagaggtggttatatctataggatatgttccttaaagtgggattgccaggtcaaagggtatatgtgtggcacatgaacagtgttaagaactcttgccaagttcccctcagtgggagtggttctcatttatcctcccacccctgagctagaatgctagagggctagaatgctcttgttccctgctttgtattatggaaatttcaaattttcatacatacagaaaagttgaaaaatagcaccatgagcacccatataccctgcacctagatttaatgatggttagttttcataaaccttcttctttctctccctccctttctattatttgagtcattcgtaagtcgaagatatatgtcatgtttttcatcatstcattttatctctaagtacttcaacatgcatctgctaagattaaagatattctgttcctagccacaatatcattattacactaaaaaaagctaacgattccataaaattacctagtattccaaaattgagatttcccatttgtcccagttgtcttccatagctatggattttgttttgttttcaaatcagaatgaactgctttttagcttgattttcctctttcccccacattgatcactgactgtctcttactgccagaaaaagtttgactagttttaagaatgatctcttagtgtttcatatcccttatctcgtaggattcattttggtatagttttacagtttggggaactggggtgcagaaaagttacatgccttgtcatagatagacctatttctgggatcaaagaatttctttgtgactggaaaaggttgactgggtgatgttgttcagacatcaaactattagaattttggggactacaggacaggattttttttaatggagttttctcctctacccttcttctctccctggccactctgattctcagttaactacattttgtccccaggttcccagggaccttcttgcgagtccacaagcaacggcagacacagtgcctcatcacccaaagcccccgaccctgaggggctggccaggcccgtctctcctgacagcccagagatcatcagtgagcttcagcagtatgcagatgtggctgctgcccgggaatcccgtcagagctccccaagcaccaatgccgccctgcctggccccccggcccaacttatggacagcagtgctgttcccgggacagctctcggaactgagcctcgactagggggtcattgcctcaatagttccctcttggtgactggccagccctgtggtgacaggcacccagtgctggacttaaggggccacaagcgaaagttggccacaccacctgctgcccaggagtcatcccgccggcggtccaggaagggtcatctgccagcccccgtgcagccgtatgaacacgggtatccagtctctggcgggtttgccatgccacccgtctccttaaaccataacctcaccacccccttcacctcccaggctggggagaactccctgtttatgggcagtaccccctcctactaccagctgtccaatttgctggcagatgcccgcctggtgtttccagtgactactgaccctctggtgccagcaggccccgtcagttcctcttccacggctacctcagtcactgccagcaacccctccytcatgctcaacccttctgtgccagggatactacccagctattcactcccattctcacagccactcctgtccgagccgaggatgtttgcgccttttccttcccctgtcttgcccagcaacctttcgcggggcatgtctatctatccaggctacatgtccccacatgcaggctacccagctggtggcctcctacggtcccaggtgcctccatttgactctcatgaggttgccgaggttgggttcagctccaatgatgatgaggataaagacgatgatgtgatagaggtcactgggaaatagctagggagcccctccccacctcacttggggcccccagcaggttgcccaccaagctgraaggcagtgatttagaccttttgagaataggacacttggcaggagggaaaaggaagaggacaaaggagggtggttggccaaagtggcagagctctgttgctgtttaacaaaagaggcaaaaaaaaaaaaaaaaaaaaaaaagtccaacacagcagcaatagcgggaaatcagggacccaaaacagggatggaggggcagtgcagcctcttttccttcctgccttgcttatgctgtctgcttgcttgctcgcccatctgagtgtagaagcgcacatcccatttctgtctttgggaacattctttcccaagagagctgccttactaggtgacttagcttggcctggggaggggagtgaaggaagggagaatgagtgagagaaggagggtgggtagggggagcagactgtgatcccatgtgaagtggggtctttttagggggtgggaaggaagctgaccaggtatgtgtgtttgtgagtgtgtgtgtgtatgtttattttgtatgtgtatgtatggaacagagcaggggtgaaggtgggaggggagggagggaagaactaagagggaaactgaaaaatgaatttatctttctttaaatggaagtcagtttggtggttcatggcacctagtgtgaacatcagggtgagcccagaagagccatggaaataacaagtttccttcgggatgggtgaagagaaggcccagctaactcaagtccctggtattcagagccacatttgtgtgagaatttggggaaattcatgagagaaaatgggcattaccaatctatgtctcttaaccccggtggctatctctgagcagctctccctttccagcttggaaggttgtctgtgtgcagaggctgggagggagaagcactgcagtacgtgaatgaaaggtcgcagagttgtggctggaaaatacatttttcaccagggtagaactgagcccccagctgcctatcctggtagtcttttctgttcctttccttcccctttagagagctccatgttaatttatttcttatgggcaattatttattacttggacttttcatgtgtcttgtttatttgggggtggggggaggttaggggtaaggagggtaggtgatagaaagggaagttttaagatatcccagaccctatagccactggtgaaaaacaatcctggatggatggtaaattgaccaggggaagagttaggtttgaccaaggtttggattaaacaactatatttttgagagatggcttttcaggaagatcagggaatcctgagactggatagttagtggagggtgggactcattccacagaaatcgaaagttgtgatcatggagtttgcaattgggaagtaagagaccccagatttggagctgtgtcctcctgggatgatgttagatgttggctctctatgctgaatagtgaagctgtggataggcggttgctgggttgagggactgttgatttcatgttcgaaaatatcttcaggtggtccatgtaggcctggtgtctgctgcctccatctttgaaggaacatggaggagccctttctctgtaggagccctaagtctgggttttatcttaaaagaacacaccagtcattctgggtctccccttattgccattgccaggggagggtcgtctagtccttaagcataaacactggctgtcttcctactggtgtccccgccccctctgtatccsccaccccaacactttgccagacagttctttatgatgaacaaactttggctttagagctttaccacttacccatggctccctccttactgggcaggtggtgtacctgcctcttcccagcccagaaggcagcttagtcaggtcatcccagtagtagctcctacagctcttctgaccagcccatttccatctttggagggccttagcagactctggggtattgtcctcagagaagagacaaggagatgatggatggggtgcatgtgtatatgtgtgtttgtctgctgtccaataacaccaaaagtggaacttaagaagctttgtgttttcataagcaccctgccagacacttaactcttctactcatggaagccttagatctacaatttagctatgcaaattattttaataatttaaaaatagcagttccaaccagtgctttctctttcagatgcatcccaagaatggatggtgaagggactcagttggagtgagctctcaggttgaggctggtgcagtaggagtgagctagactgaatctccaatttatgggacacactcagaacctgggttacactgatgcctctcaggccctggagcactgggatcccagagatgcatgtgtgcatgtgtatgtctgtgtgtgtgtgttgtcgggagaagggggtagtatttctgtgttcacttctaggaaatcactgtactagcctccaagaatccggaaaccttcccagccgggaactgaaaccattccctggagggatgggcttggcttttgaagttgacagaaagtaaatgggtattctgagaggcagcacatgcctactgtctatccagtgttccagggactgggtcttgcttctactcagcagaggccatcattctgggaggctgacctgactagagaaggctttcttttatatgtgcagtttctattgtgtagaggggttgggggtgggatcatgggaaattggagtgctaccaggtccatggtttttgctttttttttttttttttttttttttttttttttttaaagaaaataacctgaaaacacttctgacttttccactgtctctttatatgtgctgataggcaaatgtgcatgcacaccaaacataagcatgtttgtgagggaagcaggaagtatctcagagcctaagaaccatgttttatagtttctttgatcataaacacttggtggtgtcttccacccattatccaggcctgaggggggcagggtggctggtgataagagggagggcagaaaatcaggcctaggcgttttcccttaccattgtcttccatggaatgttttcaagggcctctcaagccccattcatctggtttagccaagttctcagcctggggaacacagtactacttaatgattgaggtttaccatttatagtgatgcttgatttccttttcttaatatatttgtagataaaaattgaacagggacaaagtagctatttaagaaaggaagtgaaccatgttgggtcatatcattttctttagattggatatctatgaagtccacacccctttgagttatgctttttaggcatctatctcatcatctcctgatttaaggataattctgtctggtccttggagctctcttccctaggaattagtgtgtggagtctctatatgcttgtgatccttggagctctcttccctaggaattagtgtgtggagtctctatatgcttgtgattcacaactaaatatgaaatttctcaattcaggagcaggaagcaaagtgctggggtacagttttgcagattggttgaaacacttagccaaacttaagtggcctgggtaggaccatcactcccaaagttgtcagcagagaagggccctctgtgtgagtctattcaaacctggcattgctctgaaattgagtcctcatcccatggggaaggtcttctgggggctttacattccttgttactagtgttctggatattaccttctgcttcccacttccttttttttttttttgagacagagtcttgctctgtcacccaggcttgagtgcaatggtgtgatcttggctccgtgcaacctccactcccggtttcaagcgatcctcctgcctcagcctcccaagtagctgggattacaggtgcacaccaccatgcccagctaatttgtatattttttagtagagacggggtttcaccacgttggccaggctggccttgaactcctgacctcaagtgatccaccctcctcggcctcccagtgatgggattacaggcgtgagccactgctcctggcccccacttccttttgatttctcagatcagtctttcccttctgagccatggccttctgtgcacccagctcagtggctcttcacccctaaaactaagtgaagtcatccttccccaaaaggacccctgggagatgttctggccctctgctgactactcccaggaatcagcacctcaaggactatttgagaatgttgtgctctctattggtcaccttgagactccgttcccctgctgccaactcttctcttctgccctgtgtattctgctgtgatccccttaacggcttttctgtgctactagcttagccctaggccttttatgaatacctgagtcttataacaatgaacttcttgagcaggcagtgtccaacttctttgctcttcagggacctgagtgtgcacctttcccttttgcaggtctatktgacatagtaatctagtgtgttggggaggggtagccaagcaggctgcagtgtctgcaatgcagagggcttggggaggtttgggtactctctgctgccactactgggatgatattcagaagagagaggacctcatactgtgactggacccaggaccctccctggaagagagctcagcccagctgtgtgtgtgtgtgtgtgtkagtgtgtgtgtgtgtgtttgtgtgctgtgctcatgtgcacctgggtgtaaaatgactgttatctggttgtgttactcagggtgggctggggactcaccagaagaatcccccccagcctgcccaagacaggtttttcccttgtaccatcttcagagaggtcaggggaagagggtccaggtgggttaaggggggtcgctatggataaccactaagaccagactgctgccaggaggagtgggggataatgaggtggccccagggtcctggcacctggctttggttttccgtcttctttcctcaggacgcccctgaggcctgggacctgtgcctggcttcgaggagcatctgtggctgggtgatccagctgctggtgtgatcakgggcttccctcctctcagcagggcaggcgctcctgccccagagactgggcaactggctgtttctatgacgtatttatttttacttgtgtttcatgtcacttttttaaaaaaaagcaaacagaacaattgtaagtcagtataactgcctatcagttttctttatttctctttttgtaaaataaaatttaaactcaagaaggcagtgttgtttgatcaaggaattgtctggatagttgtttggctgggtggtggtgaaaggaatagatcttagaacatagtgggctctgggatagcccttgggtgatgagataggcaggaacagaaggaagactgatggcaggctctttgttgcagtggggttcactgggctttttctgcttttgttcacctgaagaaggatgtattaccaggctccaggggaaacagcaagctgacttcagagtggcttgaagctagctggtcctcagccaaggcaagtcctgcaggggcagccctgactagacagtgagtggctggggattgggcacaatgccttcagagggtgggagacagtgtgtctgtgagtggctggtggcagcgaaarcattcttattgcatgtgtattctctgtcatccatgttggggaatctagccactggcccacagagttaaacagagctttggagtgtgagaggtgggggaaagaagggacagtctactccagcttcctgtttaatttcttcaaggggaggggccctggggaaacaattttctggaaatttacaaagaaggatagagaaagaatctctgtagtgattccttggacagaggaaggcaagaggagatgaaggccaagtctggactcatgataggggaatctgtgctattgggagataagattgggagtggaggatggttgcagcacatggctgggcgaacaggtttcctcagacctgttacaaggggttggaatgaagaaagtgccttgtagagtaggctgctgcctcctggtggccagccgctgccttgcagggatcctgccaagggacytcacttggcactgttggaagcagcctgaggtgaagctgggcaggctgatgtcatggcctgcagccccagtcaccagcggactctcctcccacaaaagaggtgctgaagctcctgaggcacatgttgaactctgatgtggggctctagagttccccaatcaggctaagggaagtgagcagagagaacaagataaagaatgggcacttccttataatggtttcctgggaaaagctcaccaccttctgagaagcaggagaaatgaccacgcagaccctgcaggcagaggctgtcagtctctgagcccgggccatggctgctccttgtgtcaaaggaaatgctaccaagtgtgtagcccgcctgcctggggcacctaagctgagggtttgaccatgtgcttgatgttcataggtaaaacaactgctgcgacctgcactggcccagcccggagtgcctgtgaggggccagctgcctgttctgccagtttgcctagagggctgggacaggcttggccctgtggataaggttcaaactcccctgcctgcggaaggaagaatgtgaagcagagggaaaggaagctgggattttgactgtctctgtgtgcccagcctgctctttgctggtgcagtagtgggatccacaaggtgaaccaccctgtgactgctgacttttcccaccaccaccttcgtggtgttcccatctgctggatccccctcccaaacatcagtccttgtcaggataccaaagtagctcttggcctcgccggtcttgtagccaagcttatgagcatagttgtcaccttccccacctcccaccaaaagtccgggattttcacgaggggagcgttttatctttgggcccctagaagagtgctttgtagtttgtaggtcctcagaaatttgaggtgaagattgaaccaatcatcaaggagcttacacttgacgtgggaatcacgtaagttaccgctaaaccacaaaggtagaccagcctcccacagccacaacctgggcactgagggaggagcctggaagaagggcattcccatggaacgtgaactccaggagggcagaaccttggttttgttcactctatccccagcccctagaactgtcctggcaaggagtaataataagtgttggatggatgaatatactcacggaagtgggaatgggtgggtggaggcaggaagcagatatttgcgctatgcagaagttggatccaccagtttcttccgcgagcccagactgggcttcagcttcctcacctatgcctttcttggttcccaagtctgttgcgaagccacagtgagagaaagtggcaggactaaaggtggtacaaatgccagaggctgatactgctgtgctgcgcctccctaggctgtacaaattctcctcagccccagctccctggtccccagcctggccctctactgcgggccactgggctgcctcccgtacccgagcctgggccaggctgtcactgtggtgctcctgccaacccagatgccctggggtgttgctaaatcaacctcagcaaccggatagtttgttggaggcgggaaggtacgccgtgggttccgccgcagccagcgctggggctaggcacacgcccgttgccatggagacggggcggggcaggcctccgccctccgggtcccgcgcgcacgcgcccacggccacggccatgtcccgccgcgagagggggcggagcgagcgtgcgcggcgggcgcgcgcaggctccgtaaccgaaccctgagccgcctgcgcggatcggcgtccgcagcgggcggctgctgaggtgagggccgggccagaggagaggcatacccactggggcgyaggtctgggactccccctgtccgccctggcgcgacctcaggactckccgtgtcccctccgtgacccccgcggcccgggccgctctttgcatcttgtcttgcccacagctggcctcggccaggtccgagggcctggatgcgaccttggggcagcccctactcttccgggcagcccacttccgcggccaccggtgcagggcatgccccggggccgtggaggtgagggaaagaggcgcgagtcgcgttttaactccgcccccgtcccccaaggccgcgcctcgcagcctgggctgcaaactttagcgtcctttaagttacagacgtgcgtggggctccgtgaggaggtgggcgaagagaaaggctctgagtaaataggcaaggcccggggtgagcaggggctggaatccgaaagtgggaggcggcggccccccaccctccatagtccttccgccctctgctagcaccgaagtttagcccaggacgggggccgtttaagggcccggccctccgccgccgcgcacgtgagcggcaccaggaagctggctgggcgcagccttccctgaggctcgctggcaccggccgcacgcgtccatcccgggcctctgagyggagggggarccgaggctagagggagggcgcagtctgcccaaggtcagcggcagcggcagtttctgggcgccaagtgtgattggagtactccaggaagaggggcgtgaccagagctctagcgaagagacctgacattgtaaagctaggtttggcttctgatttccacagggggtttgagaatgggacgagggtgctttagagggaccggtaggctttccctgaggasggtaatcagggcwtgatggttggctcagtggttatttcctgggcaggggtgactgttctttcagctcccagcactggagcgctcggcccctgccgcactggatgccagcagttactaaaagtgagcctggcatttcaggtgagctcccagaccttcttccttttctcttgaatataggggaaattcacgttacctctccacgtgccgaccaaggctctgagacccccaggtgggttttcttcccccccgccgttttctgagcagtttgggaagtgagaggaagagaaaggtagatactaagtttccttgaggagacaggaagtgttcagctgagatggcagatcagggtgagggcttgtcattcccaaggcaagtgggggcctagatgctgagagttttccagctttgggctcagagatgtccaacaaggatttaatgcttcaggcgttttggaagccagtcaccagagaggagagagaaagtggaaatgaggggctggaatcagactgtctgggcttgtgttgcctgcattttggtccacgtggctctgtttaatacctgtgttaccttgggcaagtctcttaacctctaactacttgaacctttagccttacctacctctttggattgctttgagggtgaatgaagtagctgtgtttcaacatttagacagtgcctggcgtatagtaagcattcagtggaagatttctcatcattatcaaagaaaattggaatgaaagttactggagacaagatgagtaggacaggcagaaaagagagagatactgatgggtagaagcacagatgggtgagactagtgggcaacacctcaatttcttgacaccgaaagtttagaaatttactttgcctctttgtgagcaaatactgtgtgctcattgactccaaagacaatttttttttagcgtaaaatcaacacccagcacccacagggaagaaataattccacagagctaagtattccacaaagttgcagcgtggcctttttagcttcaaaaccttttaaatgttaaatattacttttaaataattggggtgggaatgtccccccagtgggtcacatggctcccttcctctttaaacagtcttctctgggctgtgatttttcccccccgccaggcaactcaggtcaagccctctgtgtaagagggttaggcctctggccccaagctgcctggagaactaggcagcctgccttgaatagctcacagactggcctctgtgttatgttcctgggactgctcttgaacagcttcttttcctcttagggataattgttacttcctcctgctgtgcgactccccttttagcagccttttcctcttactactcactgtttcttctgtgggctggaaaattgggatgaagcttgttaacattggtggttcaagtctgggaagcttagtgttggactttgttctgcctgctcaggccgctttgctctggtctttcctctggttctggatgggtaagcttgctggatagcaaggtccctgcaggccagatgtacttagaaaaggagagtttcttatgaaattctcttcctgaggcacatttttcctcacaagtttttgttccttatggtttccctgtcgttagtaagtgtttggaccctagcatttgccagtcctccctctggcagtcgtccctgaggcttggggaggctgggctggtggcgtggctcarctgtggggaggaagaggtaatgtggaggaaaggcaggctggctggtatctggtacatcttcggggagacttgtcagggcccggagtatgtctctggctgaatcactcctgtgcccctctrtgactcagtttccccaggtgtgaccagggctgccagctgacagtttgagctgctctgagatcctcaccaactgcgattaagaaataaagaggcttgtggcttcagtcatccttgtagctcccttccaggtcactctgtgtgtaaacacctctggcccctcccctttctgggtcagagcacccaaggcaggtctgaggaggttgggccagaactggttggcgggcaagtgggcacattgtcagagtaggctaccagcctcctctcccttctttctcctttgcagctgccttgaggtgcagtgttggggatccagagccatgtcggacctgctactactgggcctgattgggggcctgactctcttactgctgctgacgctgctggcctttgccgggtactcagggctactggctggggtggaagtgagtgctgggtcaccccccatccgcaacgtcactgtggcctacaagttccacatggggctctatggtgagactgggcggcttttcactgagagctgcagcatctctcccaagctccgctccatcgctgtctactatgacaacccccacatggtaaggagtctccatggggttctgccccatggatgggcctggtgggccagggcttctttggggagggtagttttggttgctgaggaaagggtgggagaatcttcaagctggccctgcagacccctcctctatgagcttgaagcaccttccagatttagcctggacttctgctcccggcatccatttgtgggctttctatttgcccaggtctggttccccttgcccatggctacttgtggatttccaaatgcagtggactataccaccatgaatccctggcttctgccaggactttggtcccctgcctcctcttcttgtcatccctccttccatctccatttggggccagtgctctaaggccaggccattcagattctgcccactctttggggttacatcttgctgtttctgtgctttccatccctcagctcttctgccatagttgtaggcccttgagggctgagagggcagtccctggggatggggcttggaatcttacctcttcagccattctgatgcccctcaacctggtgatatggcatttccttagacctcaagctggtgctgggagatggccaagggggctagtggagccagatgagttacttagaatgttcagaatgctgaagtcaaaaactaatccagcatcactagcaccctgtgagcgtctggctgttcttacaacctatggtgagtcagagcttgctaatgtaacctactgctatgctatggggtggtgctgcccacagctggatgggctggcagctctgtcaagggttcttcagcctctactactaagccatgccaaaccaagcatttggaatccccagctctgatttccttgcctggagagctcaagtgcacaagtcctgcagtctacccaatgtgtgctgaccggcttactggggcactagttgaaacaggatgtactggttccctctctgtgccaggttctactctacacctacactctggagatgaatcagacctggctctgccctcaggaagctctgtgtggctgacatgtcagccccacataagtgattctccaacaagacactgtgcttgatgtccacagaactttgagctgtaggttcagggaggctgccatgagtctgctggggaggctcagagaaggggtagatttcagctgggccttctcatgtaagtagaattttgctttgttgggaaggggtacttggctaagaaaactgtgacagcaagagcctgaagacatgggatgaccagagaattgtggttagtagacatgtcttgggtggagaaaggtggaagggtttgcccagccaggtggtggggaagtacagcaggttgagaagaaggatgtggcacaatttgccacctttgttttaggaagttagctgaagggcaggtggaggagggaaggagatgaggcaggaggccgtagaagagattgggctgggtccaggtgagaggcgacatgggttggttgaggttttgcagtcacatggccaggagatggcactaactgaagttgggagcactggagcctgagtgggatgggacagacagtgggctatggggagctcctagagcagatgtgtgaccctcaccccttcaagggctccgttgtgtaaggccctgcccccccttccacacctggcccagtcagagccttctgcaagaagagtccttgcagctggctgtcttctcattggcgtgtctgcctgttctggaatcaacaggttgcctcttgggttggaggtgctaattcctggatgggaaagggctaaggcagcagggtaccctggggtcagtgctggaggctggtctagggaagagtgagatggaagaagcctggcatgggatattctggcctggccactgcctcctgcagctttcccagagatgtggtggaccccatggggtgggccctgggtctccagggttggttggtcatagtctgactagggtgcttgtctgggggactgtggcctgagagcacagccttgaggctagcagtcccgagttctgattctgtcccatcactgtcctgctgagtgatcttaggcatatcccataatgtttctgagcctctatttccttgtctgcagagtaatgataaaatacctgcttcatagtagactgagaagagttaagtgatataggtgaggcatttaccccagcacttagccctcaacagatgcttaacaacaacaaagatgggtgggaaaaccacttgtgctaacatatgctgagaggtcagactgagcaaacctagacccttggcctggctgtggtcatttgggtggcacagaggatgatgaacaagtcaaggtggcccttctgaccctgcccatcccagtcctgggtcagtccagaagacacctgtgtccccatttagagctaggtcacacttggcacctgggatggctcagggacacttgggtccccatttactcttggagctggtcagtgcattctctgcctgacagagattgtaacaggttcagggaaccatggacccccaggcttcaggtgctcgtggctatcacagactggtccggaaggacctgaggcctcctggtccacactccatattatggagggagaaacagattcagatagtaggagaaaggcactgatctcatatgtttttgttttcatttaacaaatatctgagcacctgctctgtaccaggctctgtgttgggcactagggtaccatggggaccaggacctgccagtgtgtgggtgttaggagcctagaggaaaggccccatcctggtcctggagtgggctgagaaccaaaggtttttgtcccctaggctgcctccaccagcagtgtgcagcgtggcatgctctggttctcagagaaagagaatagaggctgacctgttcagtgtcccacccccactgtgtccttccctagcccagagtgacaggagccagaacctgcttctctgtgagtgtggggaggcagtgaggctgtgtcaggctctgtgagtggggtggtgagtaaccaggtgagaggtgccacctggctttagatgctgcccaccccatgaggtgtgacggacagctccctagccatgcctcgtcctgtcctcagctgggcagggagtaggctggtcccacctaggctgggtgtggacccaggaagtagcacaagaaagggtaccactaagattggacagtggcagttggtgtggacctgttcatagtagctgctgctggagctgttagccttgtgccctggagtcctgtatgggaagaggctgcaggtctgggtgagtggttcttgtgaggcaggaggaaggattccattctccatccctgaaacccttggcatggttgggaatgggaaggtggggaagaagtcttttgggaagtggacagaccctggcaggggctcatgggtgtactcacccacctcagagcccagcattcatggagtgtgggccattcctcttcaaggtatgcaagggatggggtatgagttcagagataaggatcacatgtaggcggatgtcagtcacagatctcccttacacacactggtccatactgcccttgcatgactggggaagggtcctgactagaaaaactgctctgcctttagccctgcttctgcggtgggtgctgggggcttggaaagtgacttcaggctcccttttggggcctggtccctctgggagccttcagtgttggaggggaaggaaggagctgagaggaccctgagtgcctcgcttgatcctggccagctctggcctgtggacaggccctagtggctgggctgctatcactgtgcctgtgggcccatcctgtctgccaggctggctctctacctcctgccccaccctgtgccaccatcacctctgctgctatgtttggggcttaagcaacctgcctgcttgcttatatggggagcctggctggggcaagatgggtgtggcagctagttcaatttatgtggcccaagtgggcctatatttgctgcttacatctactacctaggaggtggtgtttgctccaggcatggagtgggttggggaactggtggtacttgcttctgcctttagtaaacaagactgccattgaagccccctttcccttagtccaatgagaaccaaggcccagggccactaggtctgcaggggcctgtggtcatttggctggcatgaccacagcctcacagaggctggtgagagttctgatgtaggcctgtgtcacactccctcctccctcagtgtgtgtggagagaaggctccctgccctccctggaggcacttagtttgggtggagcctgggaaggggtgagggagtaggatttcccaggactgacctcctcaacaaaggcaatgggaatgtgggctgggatgtttcctgagggctcaggccgccccctatcctggttactccatggttattttctgccaggtggagtccaggcatttgctgtgcagcaggttaactatgtgggacaggtctggaagcacgagctcctctctgcccactagaactgtccttgaggtgaggtgagacgaggtgtgagaggaaggggcttcggatttgcccttctgggtttgaatcaaggctccactgctaaccaatgtgtgactttaggtgagtcacttggcctgtctgagtatgtctcctcatctgtcacatgaggataaaagaatccctacctcagggtttttgttttgtgggggctaattgataatgatatggcccaatacccagttctttaaataggtgggtgtcacacttgacatccagtcctgcctgaggacctcatgccactgggactttgtacttttagggaccctgcctgcctctctggtttagtcccagcctcctgcaggttgtctgggccatgtgaggcggcacagtgcagggaaaagccattgtgcagcccgctttcactagggccaatttccgggactcctggatgcccctgggttgtgtggcgcagctctgaagctggtctgcttgagtttgaatcctgacttcagcactcccttgctgtgtgaccttggctgaatggcttggttgtctgggccttgggaacagggttgaaaacagtaccaaccacagaaggctgtttggatttaatgagcttatgcttggaaggcagagtctggggaaagtggtgagtgcctggtcagatatcagctgtttttaggattctgtttgaaggtgtagggttatagaggaaggttcctgaaaggtttctaagtaaactcacctttgagggctggtatcttgttgactcctttctttcctcccgagcctgaagaatgaggcttgtcctctggcctagctgtctgcatcatctcgtgtcctgactggtgcctgtctccgtgtgcctttgggcataagcttcccagggaagttgggggttggcgtgttgacctgtagcacctaggagggcaaacgaggtcccgtatcaaccacctagtcatgggccagtgcagctcgtctattcccttgggagtacaagtgcaaatgaagggccctgcctctactttcccccttaacttgggtagctctgggtcagtgggctggcatgggaagagtaagggcagccctctgtgcctgggtttgagagatggtgctgctgtccctgtcaggttgtgtaggttgtgggcctggggttggcagtttgtattaaccctgaacccaatgactacatttggtctgggccgctgacaccatttctcattcctgcatcctggaagattatcagtcttgtccagttcccagactcagcgaggtcttggcttggcaggggccccgagatggctgtcttcgctatagcctcacacaatagggtcggcagggcactgtgacaccactcaggaaggggcagtggggccagccttgggactagctcgtacctggaagcctcaggttctaagcagactgccctctcctcccagtaatgggactcaggaggcttttcagcccaaaggagatgctctggggcctggcatgcctctgttgttttcctggtactcttgctttgaggacacatcctggatgggcttgtctttaccccgagtggtggtgggtctggccactgccctgtttcccagatgtggttccttgtaggtactagttctggtccaattcttgttctgggcagaggtacccagagaaatagctgatctggggaggaagaggagcaggcaggtagggctgggaggcccaggcctatgtcctagggttcggcccaaatacagatactcattgagccaaggtggatggggtctcttgcccatcaggacatcccaaccttctgggcacttgacagccttagtaggccttttccctggaggcgggtctgggctttactgggaggccaggaaagctttcctctgccactggatcagccttgccactccctaggttattttagggcctgtcccatttcctccttgctggtgccttgttcagctgcttcccagcttcaactttgcatggggccacttagtgggtggtaggcttgctgagagaccttctaggctcctccttaggccagggcaggggaggaggtaggaagtgttcttacttgtggaattagggagttgcttagccaggaaaggagctgctgtgccccacacacctcctggatcctgggagccctgtcttcttagctcccttcttccactttgacaggagctctgccttttctccaggtggagggagaggaagtttgttatggtgcagggcttgcttgtgtgtgcatgcatgtactgtcactgagcatgcctcaagaactttctgtgtgcgcaggatcctggacctttttgcctagaggcctggagtgatggagagagatggggaggccatcagttacagtgcagcacaacacctgctccctggtgggtacttgggatcagagaggaggggctgcttggtggagagcaacagaaggctttgaaggggaaagttgagctgagtcttgcaggatgggcaggagtttcccagtcagaagggactctggaatagggtgaagaaggacatttcaggcagaggaagtagcttacgcaaaggcaggaagcatgggaggatgtggcatgtttggggagctgcaaatagtttcatgtgggtgtgtgtgggggtgtggcgggtgaggaggctggcaaggcgggctgggccagagcctggatctgtccctccctctgccatgcagacactcagttggtgcctgcccacctgggctctggcccctgctggggcctgaggctgcagaaagggagtgcaaggtgagtgtgtgggcaaattcatgcagtattatgtgggccactccaaaagagccttgcctattggcttgtgaatttagtttcatcctagaggtaaattgggagccattgagaggttctgagcaagatgaccacatgtgttctggtgtcttttggctactgaagaggatgttgagctgggagtcccataaggcctgctgaagcgttcccaggaaagaccctggaactcaaacccaggcaagccagctgtagaaaggaagagaataagtgacctttcatccgtttctccatatgacttatgtagatgtttcttttgcacagcacaggttggtagggtcagggacatgaagataggctttgtggcaggcagtgtctcttggcttgtcagcaggaggcctgccagataacttcctgcctatctggtcattctcaagtcttggcgtgtgagtagggcagttccaccatctagagacaagagatggtattgcagtgatctcctgtgcctctgggtggggtgggaggagcttcaggccaaaagaagtgactgtgtgcaaggtagacttatggagggcaagaaagtttacagcaaaatactgggggagaagagagtgccactgagccacgctgaaaggctcttcaagagggtatttgaaccggaaggacaggcagggaggagctgcatattcagaggtttgggtggtcgggcattctaggccatggacagttgtttggactgtgtcatagctactaataaccacaattatggggcatttgctgaatgctggacccaggctaagctctcgtgaagtttcttgtttaatatggcagttctgtaagtagatattgaggaactggggctcccagaacccaagggacttgtctagaatcacacgactcagattcgcaccgtggcctgcctctctcaagctgtgtttctgaccactacacccggttgcctgctactaaagctctgagccaggtttggatgccgtaggcttcaagggggctgcaaggggaccagagctgcagacagttgagggtgaccgttagggtctgcttagaagtgagagcctggaataggtgcccaagtcccaggcaaactgtgactaaaaggaaggcctgggttggcctgagtagaggaggccattcagggctgagaaacccccaggggatttcagagagggcttggaaagggctgtaatgggagggagaggtgagaacaggtaataatgacttcacagtgctgggaaggagggctggggagaggagtaagtggaggtagagggagaagcctgtttaaacttaggggtcatccctgtgaaggtgaactgctggcaaaaaaaatttttttgcggtgggtagggagaaaggagcctttagagttgagcaaaacccaggattgagggtacaaggtctgtgctgaatctcttggattcaagatcatatgtctctgagggcccagtctgaaggctggtacagacttaggcacctggaaagctgacgtgggaaacaggtagcagtaggtgagacaaagtgaggcctcttgatgccaggaggagaaatgagtactgggccttgcagcattcattcagtcctaggaagtgttggaggctcacataggagccttacatggctgaggtttctgggagccagaggagggaaattaggtagggaggcaagcagagtgggaagtgcaggcactagcaacctacagagatttggaggggaaccagtggtcttggcttttagccaggaagggacttaggaagtgggataggtccctggatgggccatgggttgcagaagaagtctagaggctctggtgatggtagctggccctgccagaggggtggggaggatgatctcttcacagaatttcaccagcaacccagatgtcagtgatcccaatcctatgtcctgacaggtgcttcctgcagcccctcctcagccacttgccaggtcctgaccctgcaagcatgtgtgtaaacacacacacacgtgttcttgctttcctagggcatgaccgtggagggctctgagctctttattaccactcctcagttttgctcccttgcctgccataatttctctgcctgtaaagcctgctcttctccaggagataggagggaaattagctaataggattttgctggacccaggctgcaggatcagccactgtacagttctgctggtggccctggggcgtgggggctgacagagggtcttatggtggggtggaagggccccctcagtggagccatgtggagggtgatggttcagaggtcctctccgcccttccctctcctggcctccagaagggcagagaccaagtctaacccctcactatgatccctgggtttccacagggcatggcatgtttgttgaaggaatagatgagagtcctgtggtacgatgccacaggcaggggccataggtgggttccagtaagaaaatagctagctgtgtcctggtatctggggctgcatggcttgtcagagctgctggttcttttaggcctgatctggcacagtcccaggaggaaggaggtctgagggcctccttcctttggccaactctcacacccatgctttgcttccccaggtgccccctgataagtgccgatgtgccgtgggcagcatcctgagtgaaggtgaggaatcgccctcccctgagctcatcgacctctaccagaaatttggcttcaaggtgttctccttcccggcacccagccatgtggtgacagccaccttcccctacaccaccattctgtccatctggctggctacccgccgtgtccatcctgccttggacacctacatcaaggtgaggcacaggcctggggtgtgtgtgttggggacagccaggccccttgggtggagctgaggaggactgcctagaatgggaggaagaagtggttttgggagagcagcaccctggggccctcatggaacaggtacctgtggagctaggaagatgggcagaggttgttggcatctctttcagatgcccaagatcttttggaagccggagcatatcccaagagcatggagaacttgttcataaatctgatctggttagtttggctctggctttgaccaaagacatccatagtgcttatcccacactcctggctcagatgaatggacaggccactttattctcatcctgctggaggcctgcaaagcaaggacctgaggctcccagtgtctgggcaggccccaggtaatcatgtattgcccgtggccctgcctgtgcatgggcttatacatctgctcccagaggccagggctgggacagcagtggcaggctctgtttcctttacttcctgacttggttactggcaatgctggcagcccaaccttcctggaggaaggagagccagtcacctggtcatctgacgggtttctgtgtctacagaaatttttttaaaacttgccctgttacacatccctcctcccctaaacgttttgtaaacttggttgctagggaaatgaccccagtttgggcttggacgtgattgttcattcatttaacttgtatttatagtctgtgtgccaggtgctataatgggcacaatgtgaatgaaacgttggtgcatgaaacagccattcacagtgaggtggtgaagataggtaataaatatcagacaaaaataggacgtgtgctagagaaggagagggtgagaaaagtcagggaaccaacttggacagaatggtcagggacagcctctcagaggagataacctcaagrcagagtcctagaagagcctttagagaggagataagaacttctagtcagagctttggtctaaatgcagcaggaagtcactgcagtgttccaaccaggaaaataacacagttggagccacgtctgtacaagatgagctgtcccatctctgggcagggtgggactggaccacagatctgggaccaggtggagatgcttaggcctggggctaaggaattagcctaggaggctgtcatgaatcccattgtgagtggtggcagcttgggcaggcccagcggctatagagctgtggacaaggatggagatttacaatcacttttgggatagaactgatagactttgggtggattcactgttgtggaaggagaggcagtgagggagtcacagagggctctgctcccctctggcctgggcaggtgggcaagtatgtagtgatgctttcactgacatgtggggaactgagggaggccctggttttggggggaaggtagctatttgggctatgtcaggggagctgcctgagatacatctaagttggggggtgtggagtcagcaatggtatgtgtggcctggagttgaggaaaggctgggctggtggatatatttggggacatcagcctgttggcagtatttgacctgggaggctgccctgtgcctccctgcctctgtgggaccaggtaggcagtggacagcctgtggcagcaaaggctgcgcagagggcgtggccagtgtggcaggggtcagggaacaggacgagagtcagtgggagtgagagcctggtacacttggaggatccttgcaactttgttcaccaaagcagcttggggaaagggacacagcgttgatgatggaaatgggagttcagatgtccctggagtctggtgttggggctgaggaatgaataaatgaggccctgggtcaccagctgtgtccttggcggtcaaagacaggtttgaagaatcaggagtgagaagacctggaaaggggagggctgtcacggtgataaggcaagggcacaggagaatagaggggagtttcctttgtgagctggagggtggtggccaaaaggggtgtggggcaggatgtgcttgcctggctgcggttggactggaggtgggggcgggctggctggtggtgtgggcaggaaggaagataccagtgccctaggcctgcttagtgtgctgcctctggggagtcccgccccatttcattcaaggaaggcctctccagtcctgtcggtgccatcctcaacctcatgggcccatctggaggggcacccctgggaaagagacttcttgggttccagacctcagaacaggacatgtggcatgtggtgtggtggtgagcaactcagccaccaaagccttttcctggcttcaggggtttatttttagacacctttgtccaaatttcccggcccctgacagcttcacaagttgcctggttttgacgtcacctctttgatgaaagcccttcctccttcctccccgctcccatgggagcctgtcagctgtgctcctggagtgggggttgagacaaggaagccagtgatatgggggagagcaaggggcttctcccagagacaggtgtgaggcatgcttgtgtgggcttggccatcagcggggagagtaagatagaggccggctgcccacagaagaggcatggccgaaggtcctgggcttgttttggcagcagggtgtgggggttgcctctgcccctgtgtttagcctgaccttgcgtcttggggaacaaagccaggggagagatgaggaaggggctagctctgtttgctggtcacagcctgcagtggacaggggtggccctgtgcctctctcagcccaggagacagcaaggagagagtataaggctcccttccatccctgccttcatctcccctgccctgaggtcagagaaaggagattactaatgagactagttgcgtctcactcttctagcaccgacagcttttaactgtgtgtgcgtgcgcgtgtgtacacccttctttttctctctggatctgggactgctgtgaaggctcttcaaatggaatgacagcagccgtcagctttctgctttggcaggggtgagagaggccaggagccctgctgccaggagttgcggggggaggacttggcaggctcaccagcctctccagaggctaggtgaggggcaggggtgaatggatcttagcttcgggtttgggaggtggagagcagctgctgtcccgggagttgcagatgtgcctgagcctggaacaggattggtctcatgggacagagggacctgaagttcacggcgagaggcccaaggagaagcacttgtcaggactctcgggattctggaagggatggctgatctcagctttcctggtttgcatggcagcctctggctctctggctagccttccccagcttggcagcctggcaaactgctatagatgctggaactctgcctttctccatataaactgctaagggcccccaggctgaacactcattcccctggaatccatgcgtactgtgtgaccatcactccatatggaagatgcctcagctttgtcaggctgctccgctggagtccaaggaggtggcctctagtacaggaggagaccactccccaagtcccaggaaaggggtatcttctggaagctgcaggatggaacagagcttgcttgaaattgcaaacctgcagaggggagatggggcccagatgtgagcccagagcaatgggcagaggcccccaaattcaccagtcttaatgagtgtccagggaaggcttcggacacatggaacagaccaggactgagggatgggcctgggaattcgatgtgtgggattgtgtgtgtaaggtctctagtgcagtttgctcatatctgtctgtagcacttggtgaggaaggccattgagagtgtttgacacacagccaagcccccatgcctgatttctctcccagacccgtccagaatctttttcaaaagtgcccttccccatggtctctgatttcagggagtttttagggggagggtctttgtaaaatggtttgagcctcctctcccaagtttagggtgttacagggcattgttcatgtagtggctgattggctggggagtgcaggtggccctggaggtcagactaatgtctgactatccaccatcaaattggagaaaagcgtgtaagtaaggaggggtcaccgaatatagtgagcctgtgaggggaaccttggtggccgaattctgggacagctgggttgactgggactgtcttaccaggggcttaaaggggataaggccaggtgtggtggctcatgcctgtaatcccaacactttgggagcctgaggtgggaggatcacttgagcccaggagttccagaccagcctgggcaacataagtgagatcctgcctctaaaaaaaacagaaaaaaaattagccaggcatttgtagtcccagctactcaggaggctgaggtgggaggatcgcttgagcctgggaggtcaaggctgcagtgagccatgattgtgccactgcagtctatcctgggtgacagagtgagactctgtctcaaaaataaataaatagataaatgaagggggcatggtggctcacacctgtaatcccagcactttgggaggctgaggcaggtagattactccagctcaggagtttgagaccagcctggacaacatggtgaaacctcgtctctacagaaaaaaaatacaaaaaaattagctgggcgtggtggcgtgcacctgtggtctcagctactcgggaggctgagacaggagaattgcttgagctcaggagacagaggttgcagtgagccaagatcacgccattgcacattagcttgggtaacaggagtgaaacccatctcaaaaaaataaaagtaaaaacattaaaaaaaaaaaaaaagggaaggaaggaagtaaagtaagaaagtaaggcaaggaccccagaccatagttctcagactgccctggctgtgctgaggtgccctgtggctatcagcctgtggtgggagctgtactcagaccctttcctgcttcacctggagtagttctgcctgtgagttttacaacccaggtgtcttgagcttttgtttggaagggagcttctaaggctcagctggtttgaaaacctctgtcctaagagaggggcaaaactgggcagatgccacctccagtcccgcccactacatgtctgttctcgatcctgaggatgctgtaactgcagtatgagtggagctgggaggcaccagggcccagcccttgtgcaggtagggcaggagctccaaagagaggcacttgtcttgaggggagtgtgactgattggaagctggacctggagggaccctggggagctgcaggttggagttctcctggggtggtggtgactgaactcctgagtggtgggtgatagcattatggggcagccagcttggaactaaggcctgtgggccccagcagattgcctgtggaaatgggtcagcctgttgagcagtggctgtgaggaagctcgaaacagcctggccacagcctgtgttctgtccagtgggcacagaaccgcttgtgtttgcttccctttagtctgcctcagtgaccctgagggagtcagtcggtgggtctgagtccacactggggccaaaacaccagtgcagagcaacaaggcctcggccggggaaatacaggtgaggacgccacgtgtggtggctcacgcctgtaatccccacactttaggaggctgaggtgggtggatcacctaaagtcaggagtttgagaccagcctggccaacacagtgaaaccccatctttactaaaagtacaaaaatcagctgggcttggtggcacacacctctaatctcagctactcaggaggctgaggcacgagaattgcttgaactcgggaggcagaggttgcagtgagctgagatcacgacactgcccagtgagctgagatcacgacactgatctccagcctgggtgacagagcaagactccgtctcaaaaaaaaaaaaaaaaaaagcaggtgagggagccccagcaggaatgtgaaatctgtggtcatttccctcttcctgcctgtcacctttgccaagctaacatgggaagcttccaaactttatttttaacaagggaggccctcttggcatctcagctcagtcacttattcagcagttatttactgaggtctcttgtgtgtgtcattgttctgcgcatggaggaaccagctaggaggcgtcatagagtcctaatcaaagccagcatccccattgttttacagatggggaggctgaggcctagggaaggaaggtgccccaaggtcaagggatggagcggtagctgagtccagactgggtcccttaggccgaggatcgttccgatggctatatgccttttgccactccatcctgtacataagtggggctggaaccaagaggctgagaacttgtcatcaatttgggatatgctcgggatggtgccccagggtgggctttctttccttctttctccaaccctggtagtcacagttggaggctgaggcttcaggtctaggagactgctgggggagccgaggcaaagcacaggaagaggctgtgtacccgcttgcccagcaggcactcattaaggcaggccttgggaactgctctgggcacaggaagcagctgctgcaggcaccttatcgggcctcttgtccacaccctcagtgaggcagaggcggttctattcccaggcttccctccctggatctcaagggctggcttacctgctggtactgccacctgctaagtggcctgctctggcacagggaggagggcacttttggcagcatcaggacctggagctgagtgacaatcctccagcactctttcctcttccacctcctccagccacagagcctagccatgcctgggtgtggggaggggagggatagattcgctgggaaaggcaaaacaacccttgtgcggtggtggcatttgggctgcacctataaggtaggcagtgttccccaggtgggaaggcaggtcaggcagagatactggcttggtggcagtcatggcttgtgtatccagtgaggctggagtacaggagaggagcaagagtttgggcctaagagatataggctgggtcctgcaggcactagggagacactgatggcgtctgagcagatgagtgacagtatccaggctgggcttcagatcaagtctcttcagtacctaggagatggggaggaagagccagaggccacagtcaaattctgcacaaagataatgcaagttagctgaaagtagcagtgacttttcattcccagatgtccccaagccaagaggcgatcctcccaccataccacggcttggcttccccggctccccttagggagctacccttgggtattgaggtgttgggagccaggcctctcccctttgttggcctaggcactggaacctgctccttagcctctctggctttaccccacctccctcccttcccccaggaatgaaagcacaaagccagcctttgctagggcggcgtgggagccaccactctcaaaataccagctcggatattgtagcttggcagccctgcaggaccctgggggctgaagcttgtctggatggtgctgtggggttgggctgtcaccagtccagagggagccttcttccccaggcagatggaatttacttatcaaagaagaattctgttgctcttctccaggaagcttgagattggaattagggaggggaaagagattccaaggagagaatttgcagtgcaccccctctcccccaagcagaacaacttcttcttcagctgagccctcagattaggagaggctagctgtctagttatgcaggtgggaaggaaaggacttcactgaggagtggagcagaggtcagaggtaccagttggagatgagaaattcagggccttctccttctctccctctcttctgtcccctgtctcctctccattcccacttgcccacttgtccttcccctctggcaattcctgactcctctggctctcaggtgcttggcttcccagctccatctgtacgagcagccttcctgctgctggataatcatcagcaaccagtttgtcagcttgtgagcaggacagggctcaaggtccttgactacacagacaagctgctaagaatgctggatcttggagagggggtgggctgtggagcctgcgatggtagagccatcatctggaaggctgtggctctcctcccagatttgcaagggagagcaatgggatcagggctgactcacccagtgctctagctgagctctccttggggtactcactcctgtactccccaaccctctggtctggccacacaacggcccaggcccaagaaggccagagcagggctgaaccagggttgtatcttggccctctgggcctagagaaaggtaaggctgggtatggatgcaggattaggggcctcccagtccatctgggcactaaggtgcttaagagcctgtgtcccatgtgcctgcttagagggaaacattgtttccccacccctcaataccccaggctgccctgtgcttgactgctgcctaggccctcctccacaggacaccgaggaagccagggcctgcgtcgtgccagggagatgaatagaggtgtaaattgtgtggtgagctgccggctctgaggtgaaaatgaaaagtcttcaggcagtggcggcagcaggcgcagcaggctggggtgccaggcacagcacaccgtctcccgccccattctctctcacaccttcccactcctgcagtcttccccaggttcccacccaggcctggacctgcctccctggctcctctgccattccctgcctttcagccggtggctcccaggctggccctgggctcgacctaaccccaagagggccattatatctcgtttccattatgtttttttttttttttttttttgagacagagtctcattctgtcacacaggctggagtgcggtggcacgatcgcggctcactgcaacctctgcctcccggattcaagcaattcttctgcctcagcctcccaagtagctgggactacaagcatccgacaccacgcccagctaatttttgtatttttagtagagatggggtttcaccatgtcagccaggctggtctcgaactcctgaccccaggtgatctgcccaccttggcctcccaaagtgctgggatgacaggcgtgagccaccactcccggcctccattatgttttctacttggctgatctgttgcacagaaaaatgggctgtgcttgagttacctttgtgacttaatgtttgtggtagtccctccattgattctttttgggttttctgagtatagttttcttaccgtcacataatggtgtttttattcatcctttccagttcctcacttcttttgagatcatctattctaatccctttctttccttccttccttccttccttccttccttccttccttccttccttccttccttccttcctcccttcccttcccttcccttccccttccttccgtccgtccttccttccttccttccttccttccttccttccttccttccttccttccttccttctttccttctttcttgttttgctctgttgcccgggctggagtgcagtggcgcgatctcggctcactgcacctccatctcccgcattcaagcaattctcctgcctcagcctcccgggtagctgggattacatgcacctgtcaccacacctggttaatttttgtatttgtagtagagacagggtttcactatgttggccaggctggtctgaaacttgtgacctcaagtaatccacccgccttgacctcccaaagtgctaggattgcaggcatgagccaccgcgcctggccaaagagggaaagagggagggaacgataggccaaaagcctacagcacccggtattccaggcagtctcccatccaagtactaactagacccgaccttgcttagcttctgagatcagacaagatcaggtrcattcagggtggtatgactgtagaccctttatttcatacttgggcaaattgagggccagagggaagctaccgatttgtgtagccaagccaatgccctaggctcctgcctggggtgctctctgccacttcctgcttcctcttttccctccctggccatcctgtcttactccctgtctcctttgcctgccattttcagagctttgggctctgctggtgtgaggggagagtagagagaggggaaggtgctcaccagcccttctgcaggctctccctgctgctgtggcaaggccccagagcaccaacagacaggtctggcttctgggccagaagctttggggcagcctggtgggggtgagaggaaagtttccgggcagaataataacgtgctaccttctagctgcagcctcttgctatacctccccaaagcatgcacgtgccatgaagaccagctgcctgaggggcctccagggtttgagtccccacttgcagggactgctgtgtgcaggcaggtgcatgttggtgtctgtaattaaaaatgagcatgcatcacttcacccagtgaggagacgccactacctcgggtgggatgcaacagctgcttgctggctgtgcagctgcctgggtatccagcctggcacagaaggatagataggactgggtagctcagggtgaacagtaaggcaaggcccagggcccctcagccagacctcatcccttgctgggcctagagcttatgtaggagatgtgacccgtccttggcccacacattgcctccttcttttgggcatttgcagccacctagttctaagcaaacctccagcctctgggtagcctgggagtgggacccatcatcagccttcgtcctgggcctgacctcttctgtcttctatttgctcccaatccctagctgaagccagggcacagggtgatgtcctgaatacaaagcactaaatgaggatagttcaggtccaggtcctctctcttacctcttttcttcctctcccataattcagaaagacctgctggggaggcactgtgggtcccgtgggggaaagcttggcctggtgtatcagtcttgccctgttgtgggagccctgagctgaatggggtaaatgcctgcaccctgcccaggagatgaactcaggctgaagtgaggtgggagtgtgtggtgtgtccccaaggtagctgacgcagtggcactgtggcagcctgtgtgaggtgggtgagctgctccttcccttttttgccaacactcctgagtgagtaagcaggtgttggtgcagggtggggtggtggtggggaagtgctggtgtctggggtctcttagaaattcctgcatcatgggtggtgtcccaagtccccatcttgtttctgcatgtggaagacccaggtgggagggaaggcccggaggtgtgtctgagggactggaactctgaatccagtttctggcagaccctgggggcaccttggcatggttcactgacttttgcctgttaggtggagaggaatgtgaacatctgcaactctcccaccttggaaagaggctttatagtctccttgggtctgtgtgtgggagtgagctgctctgggctgtgggtttgttagatggccagtggtgtcagtggcagagcacgttctcatgtcctggcaatgcttccacacactgctggctgtctgggctgtggaaggggatgtgccagggctaggaggaccccaggcccacccaggctcttcaccagtgggaccagcccagtgtgaccttgagctagtgtccttggccactggcagtctgctctccaagggctccctggggctaactgagggagaggcagctggcctcgccttcctccaatgattttccaatatttactggctcattgacatattgcccgggccatggctcctactgtgcagcaaggacctgagagccagcccatggtcaccctgtcttccctccgaggttgcacctggctgggagggaaagggcttgtcctctctgcctgatcactcagggacagagcatatagcttgtcctgcccctcaccttccatccccagcccccactagagtcattcttgctcagtgggcagagcatgcaagggagagcagtctcccaggaagggccagggggcaactacaagccccttctctgcctgtgggcctggcttagaagtttgctcctttgccttcttcctgtcccttctctgcccaagtctgaattttggtaggacctggtgcatgtgctataatgatttggggctgaacagtcaatggcattttaattagctccatgcctccctccagtagggaggaccagggcccccaggtaacagcaggtaggaccaggctagttttgggcctgaggctgcccctccaggggtctgggagcaggctctgggacctggtgctccctgtgtgagatgctgtgaggagggagagctgggcagagaaggaagggctgtgtcgcagggccacagttttctctccatcctctgtctcccttgatcctctgttctccctgatggctttgagatgaaggcgacggcaaggatggaggatgcagtttccatggcaacggggctgtccacagccaggcaacttcagagccgggctctccggaggaagcagatgcgcagaacagccgcagagctgcctcccgcctgccaacgagggggctggcagaacaggtggcacagggtggcagcctggtgctgcccagcctaggggagagggtggaaagagcagtactccctcttattatcttgttatggccaagttcctccagaagggaagctagggaggtggcttgagtgttgagaggggttgggctagggtccccattgtccctggaatctctgggtggacacaggctctgtcctctgggatcttcccccaaaagccaaatgtctgctgctcttgtgatggccactcagctactaccctttgggtcctttgtccagagtgtgaggatgttggtgaaggccatgccctgactagattcagggatccttttctttcatctagctactggggaaggacctggaccttcttcaggggcctccctgcccctggcctcagtgacctggaccagtttgctgagttgggttcaggtttggcagatgcctgcctctaagtgctggcattggaggggccccagagcctgacagctcctgcttcctgacactgtgatcttgtttagcctcctcctggagaccaaggctggagtgggtatgtgagtgggtagagaagcaaagacagccatctgtgtgtttagaaatgggacgtgtcaggggcatggactcttgagatggaggaagccccgagggcacccaggttggcaaagaagatttgactccaactattaaaaaataatgactttccttcaccgaccttggaagcatcagggctagggtgttctactttgctgttgagcacatggagacttaggatggaaggctttgcctggatcacccatggagtcagaggctgagccacagccagacctgggacaggccatccacctcccgcgtggcctcctagatgcaccctcccttcagctggctgctgagggtcctagctaggtaaacctttcaggctcactcctctttccctttatcatccgtgggcttgcttttaacccttctttgctagcttgctttagttgaaggaggttcctcaaccctagggttggccaggcaggtggacaagtggagtcttggagtggcttctccttgccaggcaataagtctctcattactgctaagtggaaggctcatttcagagctcatggtgagagcggggcgaatgctataaatagtcgtgttgtgaagattggcgggtgagcagtgacagggcaggggccttgcagtcatcatagtgggtatttgtgctccttcgcaggaaaggtggcggggcaggctctgagtaagaggcaacttgacccctgttctggctgtccctgcctgcctcagggtggctctggcatgtctgtgcccctccatactcattgggggatggggagcactggattctgtgtctaggcagagggaggtggagtgccttttggaacttggggcccaaaaggtggtacatcagcccactgggtaatgtcctgtgctagatctacttgtcctacctgaccttccagtccagggtctccctcttccccatcagctaaaacctgagtttacatgtgaggaggtatgggaaccatacctgatagtctcagaggttgacatagctctaaactagcaggggaatgaatgggagtggaagtggtgtttagctggccttgatccttgttcagggtctatagtagcatgtctgcaagagcaggggctggaggcctaaggactgggggtgctggtcttctgatatctgtgggtcagtcagcgttgtccagggtggagaggaggtcagggccagggggtcctgggatggaaagtctggtaggtgagaccttggcttaggcacatggggtccctatcctggggtggtccaggggtgccaagcttcatggctctgtgagaccagtgccttctggaacagctttttggtctcagatgtacacataggagagcagtgccaggctcctgggttcttttaccacctgccctagggtgtcgtcctgggtcttcagactattattgcactctggactatggggccctgctgttagggtgatctatgtgtgcctccctcagcagggctttggaacttggaagaggttgagaggcagagccagcccctgggacagaataggtaatagacagttctgggggtcacccagggacaagtgagtcaggggccctgtagggctcattctaccttttgccactctctgactaggagcggaagctgtgtgcctatcctcggctggagatctaccaggaagaccagatccatttcatgtgcccactggcacggcagggagacttctatgtgcctgagatgaaggagacagagtggaaatggcgggggcttgtggaggccattgacacccaggtggatggcacaggtacagaaggtggggtatgaggatggggccctcctggagctcctctcttctggactccaggggcttggttgaggaggctcctccctctctgggttggcactgtgggtgtcaggctatgcttggcagagggaggaaggagacccacctacctgaggacccacatgtggagttgcctgttcccagacacatggatctacatagatgtggattcacacacattacctcctggcaacacagatacaaagaccctgcctggattccctccagatgcagcaggagtacccttggaaacaaagatcacagacagctcgatgttcatgggagggggctgaggctgctcaggaaaggagtcccttgggtggggctcagcaggaagtaagattggcatagatctggaaggtaaggaggggagcaaagtgttctcttgtccctcagtacgggccccacccagagccagctgctttctccctgccagggaacaaccagggagcatgcagaggggagccaggagatcagtcacctgtgcctttctccagggccagcccacactcctgctggcagcctcaaggccccaggtccaggctggaaggctgcttgcctgcccacccctctgcaatgatctgtgaccccgggctgtctcaggcacaagggggtctgctgggttacatcccagatggtcccagggggccttatccttggccaacctggtggagtttgtgacttctaggagtggtacagggctgtggggagaggaactgtccctcctctcctccttctttagcagatgctctgcccatccagtcttcaacagccaaggtcaccctagggagacgtgtcagctagggctgggtaggagggtattgggagcagtctctactccctaggggcctgtgtccaacacagttaacttcatctgccacttaattacctccatggggtacagctcccttctgcctggtagtgcccggcagacactcttcagtgcccctactgtgggcacaggacatggcacaaggtcagcaggcccaggcagcctccagggcaggaagacagagtgccttcactttactgtgacctccctctgctgcctgcctccccctccttgacccacccacccagcttccttccctcccaaacactgcctgtcagggtcattgaaggactgcttggcacccactacagctggctgtagtggcagctcccacattccccagctcctcagcctgttttcctcccctccagcccgcccacccactccctggtgttggggccaaggggtctgcccacctctcacagggcctgtcctgacaccccagcgggactcggtgtttgcccaccaggtgcatgccactgacacagcagttggtggtgggtgcatgcaggatgtctgactgcccaaggcttggcctgtccctgcccgcctccctgctgtggccctagcttaggccgggaggtgaaagggggtgattagctgccttgtgcctgttattacattgatgtattatttagcttcagagaggcgatgaatatttgatcgtcttgcactggctgtgggcagagcgagagggagggatttgggtgaagggggtgggcttcaagtcccctgccccagtagtcgtggggatttaggtagggccctgccttgcctggtatcttctgcccagggatgcaggcatgggactctgggacctcctcctgtgtagatcttggtgggggtatagggatgctacttccccgtattgcattccttttttttttttcttctgcggcaaggtctggctctatcgcccaggctggagtggtgcagtggcaagatctcggctcactgtaacctttccctcccaggcttaagctgtcctcccacctcrgcctcctgagtagctgtgacaagaggcgtgtaccaccatgcttggctagtttttgtattttttatagagatggtgtttcgccatattgcccaggctggccttgaacttgttagctcaagtgatcctgcctcagcctcccaaagtgttgggattctagggatgagccaccatgcccagctggattccttttttttgtttgtttgtttttaaagacagttttccttttttgcccaggctggagtgaaatggcatgatcttggctcactgcaacctccacctcgtgggttcaagcgattctcctgcctcagcttcctgagtagctgggattacaggtgcctgccaccatgcccggctaatttttgtatttttagtagagatggggttttgccatgttggccaggctggtctggaactcctgacctcatgtgatccacctgcctcagcttcccaaagtgctgggattacaggcgtgagccaccgtgcctggcctccagctgaattcctttgcttgaagtgtatatatgtctccaggggctgtcttcatttcagcaggctgtcctggcctgaaggaggcacccctaggctccttcctctgaacattcctagcctaggagctgggtggtaggaggtagcatgctgggaagcaggcacattcctatacctggggtcccaagagagccattgggtgggtgggcagacagaacatacagtttaatagggccagggagaaactgtctccctcctttgctcttttcaggcctgcggtccctggggcactgatcattatttaaggagcagtgagggcctggcatcctgtcccctggtcagaagaaactacccaaaacttaaagctcccccagctccctgaccacctcattcacaggcctctgtcctgggagccacacctggggcctcagcaagaggagggccctgggccagcagcctgggcttctagggctcacctcacctctgccagtagcgcccagagggcatattmtgggggctgagtgggtggtgggggtagggagagaccccaaattcccccctctcctaattctcccacccccaacctaggccccatttgaggctcaaggaaagccccaggctgagtccaggcgccaagcagaccccagctgcacctggcttggctccaacaccatggagacagtggctggggaagctggcyaacccctcaccttctgtgatgtttgacagctgaccctctccccatcatacaggaagggtagcagatccactttctcccagtctggattcctgcacacagygagcctgagccatgtgttcctccttgccaccccagcctgcattcagtgcctctgatccagggagatgaacccaggggttgctcctggacagggcagatgaaggggctgcttgcttggaggatgtattgggggtggaaggagcaggttagaaggagtttgggccatcaacctggctcagcactggtttggggcaccccaaccaccagcagagtgctctcatcatccccttttgctatcttgtggctcaggaagcaccagtcattgggggtggggtgggtaagggtttctcagggtcgacccaggcatagggagagaaaacccttaacatgtttcatcccagcaccctcctccttgcagctggttgagtatttctcaggccttctccatcctcctcgtacttcagctccctcctcaactgggacttggtgtgtaccagaggcaggggcctgctgactccctggatgctgctcctgggagccctgcacgggggagggctgcagaggggcctcctgctgcattctgcagtcctcgtgccctgtgggtgatgttctgtagctggccctggacacatctctttccaagcttgaagtgggggtgggggaaggtggagaggacactacttgtgtctctttgttctacctcagctcctcacctcagggctgagtggcccttaataaatgtggggggagggcagcaggctttgtggaagtgcagggagctgaggctaatttagagtggggagaagagtgcacagctgcctcctcccaccctctctccctccctccctccttccctccctcccttcctcccagctctttccctctgccctgtctgtgcagccccagtcagggtagagggcagagggcagctggagcaagccccctgagcccgggaggctgcattattcatgagtgcactgcgtgctgagttgcctctccctggaggagggggtggggtggtcctagctaacctgtgctcccttttcctggtcataggagctgacacaatgagtgacacgagttctgtaagcttggaagtgagccctggcagccgggagacttcagctgccacactgtcacctggggcgagcagccgtggctgggatgacggtgacacccgcagcgagcacagctacagcgagtcaggtgccagcggctcctcttttgaggagctggacttggagggcgaggggcccttaggggagtcacggctggaccctgrgactgagcccctggggactaccaagtggcyctgggagcccactgcccctgagaagggcaaggagtaacccatggcctgcaccctcctgcagtgcagttgctgaggaactgagcagactctccakcagactctccarccctcttcctccttcctctgggggaggaggggttcctgagggacctgacttcccctgctccaggcctcttgctaagccttctcctcactgccctttaggctcccagggccagaggagccagggactattttctgcaccagcccccagggctgccrcccctgttgtgtctttttttcagactcacagtggagcttccaggacccagaataaagccaatgatttacttgtttcacctggatttgggttgtgtatttgtttgttctgccttggttgggggcggtggggggatggctgtacagataggctgggagtgggaaggagcctcccctccccaggacaaagaatggaaggaacatggcaggtaccctggggttgggggaggaggggagttagagatcctccacgtcctgctctgtgaccccagtggccagctgcccctccattgcagctgccagagagcaagcagagcctggcttgggtgagagctgagtatggggtgcccttcagggctcaggaatggggagctcacagcctgtcttcatctgcctccaagggatgcctttgtgtctgtgactagtgtgcctgcacgctggtacttccccagtaggcgaggctcccccactgtgcctgccagtggctgtgtacctgtgtgtgtgcatgtgcacccacgctcatgcatttggctctgtgtaaccacggatggatggggctgcttgggtaaagctgtgcccaggtgagcatcagggtatgattgtacctgagcatggctgagtctgtgtggatggctgtgtgcctgtgtgagtgtgtgtgtgtgtgtgtgtgtgtgtgtgtattgctgtgctttgtgtctgtgtatggttgtattataggagcatgtgaggctggctaacagcatctctatgggggctttgttcatgtacaactgtgtgtggctgtgtctgtacaactgtgtgtatggtgatgttcatgacgttcatgtataaagctatgtgttttgctatgtgtccacatataaaaacacacatttgctatgtgtcctgcagccgtatatccataattatggccatgtatgtgtggacatgtcttggtggacagctatttgtggcatgtccttgtgtgagcagctgtatatatgtggctgtgtccacatgtgcagccgtgtgtagacatggtcacatgttcttaggggcaggggtgtgcccatgtgtattatggctgtctacaagtatagctgtgtgtggttgcatgtttatgtgtactatgcatgtggccatgtccacatttacaactgtgtaaggctaagtgtatgtcctcatccgtgtgcacacagctgggagtggtggctgcctagctgtgtgtaactgtgtgtccatgtgctgcgactgtgcagcttgtttgctgcaggccacatcatgggcttttctggctgatgctgtacacagccatatctgtgtttacagccctgtgccttttgtgaggctgacttgttgagcaggttgggagtgtggctagaaggagtgtgtgactcctcacctcagcaccctcctgctgtcaacccctctgctccagaggcctggcccattgctcacctaccccagggagctgttgctctgaggcagccagagagggtgagagcagccggtggcagagttggaggtggaagacagcatgtctgtctcccactgccaccttgtctcctgttagtgatggggcttgtgtttgtttgggttttatgtgtctgtttcgtttcaaagctgtattctttccacagcagcaggacatcaggtttctgtgtccagggaaaaagctcgtccttggtgatcacccccgcacccctacggactgccacacgcacatgtgggtgtgtgtgcctgaggggtctgggcttggcatgttcattagcatgtatctgagctggccttgcttccactgacacctgtggaagaaagggcagtgtcgggaatgtgtgtagggatgccatgccccttggcacttgttagtgtgtgcacatgttaggggcagatagcacaggctctctaatccccattccttcagcacagtctggcactacagcttatccactaccctctacccaggggcgtccttccccatcctgctgtgggagggaagagtcaagagaatcttctcagagctgtcctccctctgcttgggctccagctctcactccctcctacgcagcagccagttccagaagcctttccctaggcccctcccctcccagatgcccctgccatccctaacactccctcagggttgaccctagtacttggttctgcagcccttcctgcaggttgctctctccttgcttaaataccctttttacatgggagtgggtggcaggtttaaagggcatctgcaggaaggaaggggaggccccattctcctctgacctctcccttcccccaatcttttcctcatagtgactctggctccaggtctcaaaagtggcagaggacacatgcctccaactcaggcctgggatgtggacccagctgaaatcgctgagtggggagaatagactccacccgtctcccacgcgcccctttacctatcccccagaggcaccccttgcactaaggccagctcctccactctgcagtagcactatgggcacctgtcggggcgcagtgaccttccccaccccgtgccccgtggcatccccccgccccccacctatgctctctaggtggtagtctgactatggggcggagtgggccacgaagcacccgctccagcgcagagcgagagcgctcggggattcagcaccacgaggcggacagctccaggccctgaggtccccagaaaagctggagcgcggagtgtccagaggaggcggaggctgggttgggagcaggagacctggcgtctggaggaacggaggaggggctgggggcgggccggggccgggggcggggcggggcgggccgcgattgaaagcggcggggcgagcgggcgggcggagagcgcagagccagcgagccagcgagcgagcgagcgggagccggagcctcgcgccccccgctccactccgattctctccgcgccagagccagcgcgccaggtagggtgagccggtggtggtggtgccgctgccgctgccgacctttttggcccttacctcacgtcccagggtcctgcgggccctcaagttgtggggcgcccgcgctgctgtgtccagacagcgttccctgagagctccgggaagcgggaagacagccccgggcgtcccgcctttcttctccagaaaacgcacgccccacatcgcactcccccgttcctcctgctccagcgtcctctggtccttctttctgtctgtgcctccgtctttgtctcaacctctcaggcttgctcgctccctgcccagattttgtggcccaggctcctggctgtctgactccgggtttctgtccccttcctgcctctgagcttccgtctgggcctcccctctgggagacttgcgacttgaccagttttggcttcagcccccatctgggtccctgtctccatctgtgctggtcttcctccctgcttctccctcgcttgcctgggtaagctgctgctttcctgatccccagaggagcccagtgcccctgccctggggagctgagggggcaaaatgaagaggctcagcctccgtggccagcacatggggtccttgagttagttgctgcccttcttcaaactcagtttcctttcctgttctgaggaaagaggtatgtccctctcccagcctttccaagcctgtgtgattgtgagagcctttgtggggtgtgtgtttgggaaggcaactggggtacaaatgattggacgcagtggggaagagacagggagggggtctctgagggccatggctagggtgggcagggccctgaagctgaggatggggagattggaaatggtgactttctctgctgggtcgggagtgaagagaaaacagaggcacaaaatctcaagcagtgttctacacagagctagagagtcccgcactctcaccctcagcactgtttggagactctagcccccaaccctgacacacacatacgtgaacatctgcttgccctgttgacttaggaccttgagccacttgggtaccctccctgaggccagccattccaccttgctgtctcattcccagggcttagtgtctctattccttcctcagtcagcaaactgtggggatggctttttaagaaccaaaggttagaacccttgggtgttcacatgggctccagtctccccacgggttggagactgtcccttagagatgcttcccttcctcttccctggtgggtcctgagacagcagttccttctctctggaaatccaaggctcaggatggggacctctgagtttgtgactgtgacatagtctgttccaaaggtattgacctcggggtcctgggaggtttgtgctgttcttggacaccctttgaattacagaggggtcagcattggctggggtctcctgtcctctgcctgggacttcactgcttgcatctctccccactgctgagtttggtaggggaatatggcccatctctcaccaagctgaggccagggctgagagacaggtccaggggagtcccaggagcttctcaacctacttaatgacaccatcctgtccctccctggcttttgagtacctaggaaaggggctcgtggggaggcagagtcagaaggggcagctgctctcaggttccacttttcctggtctgtttttctgtctttctatctctctgcaggagctgggtcccttcgcatctctcttcttgtctgtcctttcctggtccctgtttcctcctctctttgccttcgctgcttctaatctcatcccctggagacccaggtctgcgggacccatccatcccctttggggccatgggatcgctgcttgcgctcctggcactgctgctgctgtggggtgctgtggctgagggcccagccaagaaggtgctgaccctggagggagacttggtgctgggtgggctgttcccagtgcaccagaagggcggcccagcagaggactgtggtcctgtcaatgagcaccgtggcatccagcgcctggaggccatgctttttgcactggaccgcatcaaccgtgacccgcacctgctgcctggcgtgcgcctgggtgcacacatcctcgacagttgctccaaggacacacatgcgctggagcaggcactggactttgtgcgtgcctcactcagccgtggtgctgatggctcacgccacatctgccccgacggctcttatgcgacccatggtgatgctcccactgccatcactggtgttattggcggttcctacagtgatgtctccatccaggtacgtggaagccacccaaatgggggctagggagggaggccggaggtggtgacccagaattcctgctgaaaaggggctcatgggctgctgtgaattggaagggaaactagaagcttccttgcagtagcttttacagaagctaagaaagtgccctggtcacataatggtggtcgatttttagagactgtgcaagagaacatcttactctcattactcccacacacacacacaccctcacacacacacacaccccacacaccctcacacacacacacagccccccacacacccacacacccccccacacacaccccacgcaccccccccacacaaccccacacaaccacacccctacacacacccacacacccacataaccccccacacacccatacaccccccacacccacaacccccacacccacacccctacacacacacccatacacgccccacacacacccacaccccccacacacccacccctacacacacccacacacacccacacactccccacacacacccatacaccccacacacccatgcacccacacccccacacacacccacacaccccacacgcacaccctcacacacatcccacacacacacaccccacacacacaccctcacacacatgcccacaccccacacacacccatacacccccccacacccatacaccccccacacacacacccctacacagccacacacaccaacacccatacacacacccatacacgtcccacacacagtcacaccatgcacacacccctacacacacccacacaccccacacacacacccatacacccccacacactcatgctcccacacaccccacacgcacaccctcacacacacatcccacacacacccaccccc

SEQ ID NO: 94446 - DNA, 12069 bp, Homo sapiens
acaataatatttttagtgttgagagttcaaaggcagctagcagtaagtggaagctgaccaggttgtcaggcttgtgttcctatgttactctgcatgactcccctttaaacgtcagtctttgttctgcaatgccgtcttttcacagggtcatctactgcttatttgtggcactgttttgtcttctgtttatgtttatttcacagcttgtcagagtctataaaactcagcagaaagaacacggcttgcctgctccctctcttgaagattgattgyaatgggagtggtttctctgtttctttgtatagtcgaacagatatttacttcttccaagaagatacaattcagaggaatttttatggcaaaagttagtggagacggggtggatgaaatctgttgggagagtatcactgttctgatgggcggccttgagcaccacactgtaatactagacctggcctaaagagaatttctcatgtactattctcacctctgggaaaattacctgaaacgataaaatatcctcattttaagaaaaaaaaaatactagaacctaacaaggaaaatttaaattctttttctttgttaatatgggtcaaatttgtatcaaaatattgtaacagaaaaatttcttgtttctctgacaggaaaattaatggaatagattttcttttctagacttagctatttctacactggaagaaaacttgtatctcaagactgtcttgggaatacaatgtgtgtgaatagggactagttacataaaatttgggtttcacatttctgatctatacaatataaggatttacaaagggacattttgaagaccattgacaggagtggtttactttgtaatataaattgacatggagaggaagtaaagatgaggataccactaaagctccagctttggtaagcctttgagtactcatacagcaaagaaatgatcaaggatggtatgaggagagggctgtgagacccagtatctagttccttgtaattctatgggaaaaagaaagcctctgaaatactttccagataggaaaacagtttgctttgtttctgtttttgtcatttaaaagatatactttcaaatctgtatccaaatttgttacrtaagtcaataattgtaaatttcactgcaatcatatgtttcctaaaagagttgccttgaacttatggaactgaaccccattttgctaatcacttactccttgcagtctatttcttatacaaatcaatatccttagagtatacatttttacacctactatttagttctgtcatgccgacagaatggctaatggctgtgtagaaaagacttgacataatagactgctatccatagacaggcctgtttcccatataaacctgctggtatctgataaggtggatttctcactatttcctaactgataagaatggtggctgtaagtaactgcttgtgcaaactgcggagtttctgtgcacctgctttccttttggagacttttggaagttttgtgcctgcgaagcagagtgagtcaatgtaaccagtcccagacaaaatcttagtaatggagtatgtagagagcatctcttgtagacaacagttcacatacattgacaaaatatgattccgggtaaagtcagtgcattctgtgcaatatggtgggagaggaatcacaggagcttacactgtattccttcatatttccttccatgtggctatttcctcgtgttaatttctttttttgtttgtttggtttttgttttgtttttctgagatggagtctcgctttgtcgtccaggctggagtgcagtggtgcgacctcagctcactgcaagctccgcctcctgggttcacgtcattctcctgccccagcctccccagtagctgggactacaggcgcctgccaccatgcccggctaattttttctatttttagtagagatggagttgttaaccaggatggccttgatctcctgatctcatgatccgcccagctcggcctcccaaagtgctgggattacaggtgtgagccgccacgcctggccattccttgtgttaattttaccatactaaaaataattaagattatatctataactataggttgcatcctgttaatttttccaaaaaatgactgaacctgaaattgttttggggacacttccaaactagtggtcaagcagtgatttttctgggactgcagaagttcctgctgtgcccaacctttattactaactgggaaagacccagggagactgggatgggctcatgattctacatacagaactcatccaagaaaggaggaaaagctgatttttgtgaacgtcgctacttgtgcctgaactaactctcaggcacattagtcagaaaatactacctatggttactcccccaggttcctaaaagtaaagctttagaggccaccaaattggcaatwgaagcyggsttccrccatattgattctgcwcatttatacaataatgaggagcaggttggactggccatccgaagcaagattgcagatggcagtgtgaagagagaagacatattctacacttcaaaggtactgtgcctatgatgagcttgtgtgcacatgtatttattgtgattgtgtggaggtggcagttctatgactggatccatagtatagggtgaattgtgcttatttattacgatttattcacacttactcatgtattaaaactaatatcaaaggcaggaagtgaagatggctttctcatctttgcagtgttccaattcatgccttcaaagtgcctttactttttgagctcagcacagatcaatatggtttaacatagactatagaatcagaaaaaatcctaatcatattatattatttcttacctcctgggtgagtttcttacacttgttatgattctcagtttccattattatgttgatcatagagagagaaagcaatataagcaagctctgtgagtattaaagaataacgcctacattatctcaaattgtgtccagcccaagttgacatattaaaaactctgtttgcttcctcagtttctaaaccacaaagatacttartcttgcccattgggctgaatagatgaaataattacmctactaacatgagttgtaaaacttaccaaagataattcagataatgggtatgcttatgatttgataacaacttttaccttttgagtaatttcactctttcattcaatatatgtactaactatatatccaacatattataaagttcatcatgatatggcagaacaaaaggcatcacaagaagagagagaataattttgcctgtggtcattagttttgaagtagtagaaaatgtctaaatattaggtggagcaaactagtaaaattggctcaagttttcattacacaacttcctttctctaacctctgcagctttggtgcaattcccatcgaccagagttggtccgaccagccttggaaaggtcactgaaaaatcttcaattggaytatgttgacctctaycttattcattttccagtgtctgtaaaggtaggcagcttgtgtgatcaaattaatttcacttttgttctcagcataaatattgtttttatggatatttgaactaagcattttcttaggaggacatagggattataacatrgaagaagaatcctaaayctaactcctaattcctttctatgggatacattttgaatccatacttccgtgattgcatgtctataagaaaagaaagtgcagaactctcaaagcctctgcctcaaaaacttgaggaaatgatagtcatctccttgaaggcacaaggtcttagttatgattcctgatttcacctcttgggatgttcacagacacagagtttcatgaagctgtggtgtccagaaaacctgctgcacatagggtgcacaatgagtttccatcttcttgcctctttttaaggggcgagaactcagtccgggagtgtcttaaactacagaccttcatgggaaaccttgttgcttctgcttcctctcttttcacactggaggttttatttttgcttagccatgaattcttgkgtcattcataacttttgtcttaaggwactgaaaactagtcaggctagttaatgcaaaagggtatattagatatgataatgggaaatcaaagccagggctacattaagaatttgataaaarctctaaaaatatatcctttctccacccttatctctgctttattacaaaaggctttttaagtatttgttccaacctttttcgttggtggcatttatggctttggagcactgtcaggcccatgttcattaccgtgagctcctgtgcatctcctaatttccaaactagccttgaaaacacctccattgaccatgattggttcatggtcctgtgcatgkracatcatatgttcagggagataaagaactctgatagtggcacctgggtaaaaagtacaatccattatatctggatatcaagatcttttgcagttgaagagaggtattgccacagagaaaattataggagcagaagaaagtcaatgaaagtcaatgatgacactccattaggaaccagaaagaggtatttatttatacatgtaatagttgtaagagattagagggagcctgtcacctgaagacattccttataccttcatatgtagtacactctgtacataccactctctggagcactgcatcacctacctcatggaggattagtgtccttaaatgtacctcagagcatggctatgtgtggagaaattgacttgtgacatcactaaactgactgcttctacttcagccaggtgaggaagtgatcccaaaagatgaaaatggaaaaatactatttgacacagtggatctctgtgccacrtgggaggtgagtgtttggaggtgagagaacggataagaaagatgaggtaggatacatctgtttcctatcttcttagtacargtatggaaaatgcaccattggatcaaaaacttaggaactttacaaaggtagtttttgtgagcagygagraaaaagaaatgacaggcatacaaaagagagaagtggaggagaagaattgggggtaaggaggactgggatttatttccttrccttttcactaatctctccagtttcccaaggaggaaacagaaatwctyactcttgcaatcactatcttcttccccaattttctgttttattttttcccttttaagaaccacggctagctagttttattgtcatatctagacagttgttactttcacagttctgtgtcacatttatcttgatcttccacacctcacaattcctttttcccaggccgtggagaagtgtaaagatgcaggattggccaagtccatcggggtgtccaacttcaaccrcaggcwgctggagatgatcctcaacaagccagggctcaagtacaagcctgtctgcaaccaggtgagcaccctcagcctcctctcctttctgttcttcatgcccctctttctgtcctattgccaagtatccattcatttagtcccacttatctttgtaaaagagaagattctagagagcaaagactctgtctcgaagggcatagagggatcttacttgtacccggcttagaaaagtcttagaaaaggtgttgtaactttgatgctgaattgtgtgttatatttatgggaggtcaattcaatcaaggaggccaaggattgtcaattagactcagggaaaggtggacttacccctaagctatgaaagatgaccagagaatggatgggygaaggtgatttggagggaactgtgcatagatatgaagccgtgaagagatggaatgaacagtacataaggagagagtgagagcaagagaagagaaatactagggattcacatgggcttcggatgtctcagtgcctcttggtgtctctgctttcacacttcttgaccaagggcatagatacactaaaaattatctgcagacartgaaggtcatccatggtagaaagagaaaatracctgtttatgggagatatctgttcacagtggatgaaatccacactgaggaaggttcagcagaacatggagctgacctatgactgcccccgctcctagttggctgctcttctttggagtctgtcatgcaatcagctgcttaaacacatctattctctatgtgttccttttgtagcctagagataattccatcttttccttgagtcctgactggtgattccaggcctccttgatcaaattgactgtccccaaatgttacacacatttcagcattaaagttactacacttttcccagtaaattacatttttttgttttattttatgttttaaaacttagagtcaatcagtgaagatctacagtggaaatacatatgtataaaattagtgaatttggtataatgatacggtgctgtgataatttaataaaagcattgagaaattaatgtggttttaatactagtagttccccaattttttaatatggccattttcacactttccaaaaatttgataaaaataatactggagacccatgttaccatttatattcaaaattactaacattttgcaatgttatatggagtatatctgcataaatacatataatgtttctagaacctcttcaaggtaaattgtaaagatgacaattgacccctagagacctctcaaagcatgtcacaggaatgaagatattctcccagttccagtgtcattactgtatctaagaacatcatctatagtgccctcatgtcatttggtatccagtccatatttgaatttttccttgcttaatcaaaatatcttttgtagctcttctttttttaaccagaattcaattgtttttatattgttgtattttgatatcagttaacttgtttttcccagttgttgaaggtttctgtaaattagaagttagatgagagtgttttattacattgacttaaacctttggggcaagaaaatatttttatcatgctgtgtttttcaaattgcaccacactagactgcatacaatcacagaatgccccactagtggtgaaggtagttttaaaaacttggttaagctccaacaatgatagactggattaagaaaatgtggcacatatacaccatggaatactatgcagccataaaaaatgatgagttcatatcctttgtagggacatggatgaaactggaaatcatcattgtcagtaaactatcgcaagaacaaaaaaccaaacaccgcatattctcactcataggtgggaattgaacaatgagatcacatggatacaggaaggggaatatcacactctggggactgttgtggggtggggggaggggggagggatagcattgggagatatacctaatgctagatgacgagttagtaggtgcagcgtaccaacatggcacatgtatacatatgtaactaacctgcacaatgtgcacatgtaccctcgaacttaaagtataataaaaaaaaaaacaattggttaagctaacagtggtcagatctgttgtttttaactcatgttttctctttaacaattactagtaatctgctgggggataattctcaacagaagaagtcatattcccatgacaaattttcacatatgattgagtatacatcagtgatttgaacttttttctactgcatttctgttttcttctttgttatttcttatttgttatttccttggggtttttacataatcatttacaattttaaccacttgtttaactattcttacctgacatttaattaaaaatgatttctcaccaagtaaaaataataaactactattcctctaagtgagggtaaaggtgaacttcttccttcaattagcaatgtactgtgaacgtaattactgtaatgaccaccatcagagtagacaaagattgttgttctttttctcattgtcgcactaattactacagactcacggattcttgtgttatgatttttaatttattttactcattttttaatgctcacatctactcagcatatatatattatatatatatatatataaaatatatatgaaagaagaatgtgatcaaagactcatgagggcaagtgtaaaagacaaaagcacttgtttcatagggaacccactggtgacatttgagatatcaacatacaaatccatcatacaaaaaggaaaagtaatgaaagactgtgaaaattatcagtatttatgtgtgtatgtatattttctagttcatctatatagatatatatcatagatggcatatatgatatatatattatatgtcagatcaattagaaaacatacatatacatgtatgcatttttggtattaattaggaaactagttcttttgtctttcagacctgccctcatgagtctttgaccaaattcttgatttctggcacgatttgatgcccaaggctcaaagaatcttacctcatcccagctctgaaattggccgtgtctccttctagtggtcggagttattgagaaaccaggatagggttcatggagttgcttgtgctcagaaatagcatttctattttcttaggagagaggggcataaaatttatttttatgaaaaagatcatttttgacaataatattctcagttcaaatttaatgctctacattattcagcttcttttactttggtgattttaatattaatgtaacttttggattatctgatgcttttccatcttgctcgtctgcaggtggaatgtcatccttacttcaaccagagaaaactgctggatttctgcaagtcaaaagacattgttctggttgcctatagtgctctgggatcccatcgagaagaaccatggtaataagagatacaggaagtttrcckaaaacactggtwtgataaaaaaaatttaatcagatcatgctgtttcctggagttcactcacagctgacttggggtgagggaagaatttgcatttctgacgagatcccaggtgatgttgaggctgctgttcgggggcctcgcttgagaagctccggtgcagagtggacgccttagtctgtttagggagccgcctaacaaactatccccagcctcagggcctcagcctttctgcctttccttccagggtggacccgaactccccggtgctcttggaggacccagtcctttgtgccttggcaaaaaagcacaagcgaaccccagccctgattgccctgcgctaccagctrcagcgtggggttgtggtcctggccaagagctacaatgagcagcgcatcagacagaacgtgcaggtgaggagcggggctgtgggcctcaggtctcctgcacagtgtccttcacacgtgtgcttcttgtaaggctctcaggacagccttgggccagctccatttccctgtatttcctatgcatgaactctttgtgtacgtcataagggtttcttctactctagcacaggagaggcaacagaggtggagagtaataggatgggatcaaaactacagatttgggttagcgttaagtcagtgatatccatatccctctgctggggccatgtccttttctttattttttataatgaagcattgattagatgttctttagtctccaactcatggcggatttttcttcttgtatgtttatgtagtataaattccttatatttattctcttagaattttatctttgcgaagtgcttgtttaactctgccttttttttttggcgaggtggttgtgtgtctttatttttatgtgtaggagaccatatttataccaataccttaggatataagacaaacccacttaatatagaggcttaatgcaaaagcatttattgagctcaaggttccatggttagaaaattagcctgggctcagcctaaactcagtccattccttctgttcctggctgggctctcatgtgtgttcagggcagtgaggcagctctgcttcaggatgtccctggggcatctgtgtgagcgcccccctctcccatgcagttctttatcctccagccatccagcccagggttcacctcagcacagggcatgaccccaaggcagtgagtggacatgtgcaaagccttttcaggtctaggctcagagctgccaaccattgcttctgggaaattctatcacctaatgcaagttacaggacaggtcagactcaaggggtggggaaaaagacaccacctcttgttggaaggagctggaaattcatataaccaagcaagtggatacagggacatgtgattgttagagggcatgttcctaattaatctatcatttatacgatatgtgtgaaataacatattaatagttatatgtatgaatatgaatatatataaattgatatactatttcatatattcttaagaatacatccaagtctctaaagaattaatatccagaatacatgcatatatatgttttctaattagttatatacagatatatgaaatatacatcatatatgatatatattataaaacctatgtcatatatatgacatatatcatgtatatgtatatgtgtcactatttgctaaaacattaagtaaaatcagtgtagaaatccataggatactctgaaataatgatacagagaatgagaaagaaagtaaaaaatgacaatgaaacaattgatgaatctaggtaatggcatttactatattattttaaaaatatttttagacattagaaaacccacaaaactaaaaggaaatattatgaaataactgtggaaattatcagtatttatacatatgtgtatgttctctaattcatctagtatatatagatatatgacatatgtgttatataatatatatgttagattaactagaaaccatacatatatatgtatttattctggatattaattctttagagacttaaatgtattcttgaaataacatctcccaaattttacctgtgttgtcatattctctgtggttatgttttcacaaacaaaagtttctatccttcatgtagactaatttttcatgcctctttcttgtggttggtgagtgttgtgtcttatcctatattgggaatatcacaatatattactgtgttatcttacaaaattgttaatattctttccttataaatttggttaattctaatgggattgactttttaaatactgtatgagataaggatccaaatatgcatatctaatttttgaatttttagcaaaatttcccaccaacatttattgaaaagttcatatttgctcacataacttgatttttttacctgtaacatatatgaaatgtccatgagcaattatctggcctctcttccatcttcagttaacttatttacttttctgtactatgatgttaaaaagtaagtttcacttccagtatggtacaaatatttttctaacttcttcatttatttaataatatcttagctattcttgactaatgtgttatttaaaactttgaatcatcttattaacttccacaagcaaataaatgtttagtctcttgttgacattgtaataagcctccagatcaatgtggagagaactaaatgtttgacaatattgagatttccaatgcatgatcataatatgaatttcccacttattaatagccttttaataaatatataattaatttcataactttctctgttactgatgattttaatagtttttgataacttttcatttttgttttatggattttctaatatatagaaatattaaaagaataatgcaacaaatcttcttacctacattcatcaagtgttacattgctgtcattttttactctctttctctcattttctgtattactccttcagtttccctatggatttatacacttatttgattgaatgtattagaaagagtgacatctttttgatatttagagtctcccaaatttacatagtgagagtacccacaccttttgaatgtgaaatcgttagtatttagacaattattggcttgagtgatgttgaaaactaatttttcctattatacctgttcattggagagatagatattcaatgttattcatcaaacctactaaattatgctagacattacaaaatttgcctctagattcttgtgggtcttctaggtacatgaccctatcatgtgggcacaaagtaagctctgtttcttcttca

SEQ ID NO: 94447 - DNA, 25329 bp, Homo sapiens
ccttgaacccaccatacccctcctctcagagtcccacataaccccgagaaggaggcgcaggtaagatatttcaccagcaggggcactacgttacagagaggccacacactgcctgtgatcacacagcaagaggaaagcagcacaaggccccataccagctcttccagaatgtaccgctacctcccactgccccacaggcacaaaggatccccacagggaagaccttggaggcctgtttagaacctgaagcctcagttcattccacctgctggggcggtggctctgccaggctgtgctgtagactcagggagccaagtgccccagcagacagtcccgcaggccaacagggctgtgaaggggagtgggggccaaggtccggagcctgggggtggagggcatggggaggggaggctttcccagagggccagagggacacctcaccagaagcctccttgaggtagcccccacccaccaacacagcaacacctctagcaggcagggaccagaggagcaaggcctttgggagtggagcccctcaggcagcagggggtgcagaagggggcaagaaaacaaggctggaaaaggggaggccagagctagggcgggctttggcaatgtggggagggatggagaagcaggaaggggcggctctgcaggattgggacccaggaggagagcaatgtggggcaaaagggtgaggtcactgggacctgcagtcactcagacaagggtcccaggctggaaaccctccaaggggtgatgtgcagcttggcagacagtaaactcccacctcgcaacaacccaagggagccaggggatgagcttggcaggccccaggcccctacttacctccactgggggtctcttcagcctggcaggttgggggatgcctcccacctcctcagtagggggctgagtagggggctggtgggccaccctttctgctcttccacggccgccttggaccctgagcctccccctcactggaacctgagtgccactgagagcaatgggtgactaacctggtggccagagggggaatcaggctgctgacggggggcttctttgttacaggtttgaactaagttccctcccgctcccggggggtctgtcccagataagtcttcagccaccctttccaaggtctcaggccttcgcacaaagcacacgcggccggcttcatgctctactaggcctgttgagactcaggagtggggaggaaaggggacttccccaaggtcgcacaggaggggcggccggccgtggacacccagcccagggggccgcagggcgcctcagtatacccctctacaggctccaagttccacgaacccacacagcgctccgcgtgtgctggcttctgtgactcagggcagacccgggaggtcacggggctgcaccacaggctcgcagagcgactgactggcggggcgaggtggtggcacggcggcctcggagccttgcaggggaagcggggcgcgagaggcgagcctgagtgtgcgcgtgggtgcgtagggggcggaggggtcaagactcccacttttcctccccgcgccgggtcccaggggcctccggatcccgggggacgccagagggaggcctcaggagaggcttggggcggcgggacggatcaataccgcgcgccagctcctcggtggcccgcccgtggcccccgcaactccagagcaacacccggaggcggggcggggcggggctgggcgaagggggcggggctggcagggggcgggactggcagggggcagggtgggggtgcgagcgaggagccgcacaggcagtcccggcgcggggcaaccacagcgctcaggtaagggcgcgacgaagggcgcgcgtctgcggaccggtgtctgcgctccacgcttagctcgtccaggtgggggctcccgcctcctcggctgctgcggtccccgcccagctccttggtcccggcggcagtcatcccccggccgtccgagtccctcgtaagataccccgctcacagcgtcgtcctccctgcctggctgctagcctgcttgggttcggggcagcgccccgggcctgacctgagccgtggtggcagggccacggggccccagccagcaggagagactgccaggaggaggtgacgccggctggttagggcggaagggcccgacccgggattccaggaggtggccttttcgcatgggagcggcatggcaaatgcctggcggccggaacaggagctcgggtctgggaaactccagcgactgagtgtgtgcctgggcagggagaggaagggaagctgggacatatgcgacagcagggaggggtgcttgtctaggacaagaggcttgtagccatggtggggccgaggaagggtgcagcggggagaggcgagcatgagactgagggatcaggtgtgacagttcagcgccccctccctggggcagtgcgtgtctctactctcccccactgggcaccagacaacgaaggggctgccacggcagcccatgaaaaagcctccacagcaggcagaacttccctgcctgttcagaccaggaaataccagagtgagtgagtgtcacgacaaggtgtgtcaggggcctaaggagccaggcctgggagaggacagggaaggccccagtgaccctgcccgggagggacctagcgtggacagaggccaggaatgcagaggagagaccaggtctggctactggttagagcgccacaggggcagccgctgactcacctgggcacgccgtgactggccagttctgtcctcaccctgccccaccccaccgcaccccgtggtgagcatcagggctgcctgaggacagctgtgaggcagggcccgtcaggatcttgctctgtgcctcaggtgagttgcccaccctctctgagccatctagctaggtgaacctggtgggctggagccagaagtctgggtctgagccctgcacaagttctacacaagggtctctggaccctcccattgttcctgggcctcagtttccccatctgtacattaggcacagcctgtcactaaggaacctttgaactggagggagggagagggtgaggaagctatgcccttgactggaagggggaaggttagggatgggacaggggttggggaggggggtactcctgcaggatcctcctcatattaaggttcagcacctcctcctcctgccctgcaaacgtgcacactcatgcacattcacgctgcctcacccctgcacttacactctcctcatcacttccaggatgaagccccagactccctagcctgggagctgggtccctcagggtcacctaaccagaatcccagcttccactgcggccttcccccaacccactgcctcaccagccatgcttaacttctgcccgttcctctgggtggtgtgactcagtttcccagggttatagatccctttggggccacagatgtggaagactcccagattaacagttgccaacttgagtctggaggactcacccccggagtcataggctgctttgtggggtggggagtctaaggaccagatccccacacccagagaagcccccttccacctgtttgtccttttgaggggagacttaagtagtttgaaaagctgtgatcctctttggctgggcgcagtggctcacgcctgtaatcccagcactttgggaggccaagatgggttgatcacttgaggctaggagtttgagaccagcctcgtcaacatagtgagatcccatctctaaaaaaaaaaaaaaaaaagaatagaaagaaatacaaacaaataaaaagaaaaaaatgctgtgatctggttgaacccccatttcgtagaggggtggctgaggtacagagaggagtaaggctgtggataagttgaagcatgtccagggctgagcagccaggtgagggctgctcctgggggagcagctgagactgggcagtggggacgagggacaggaagcctgaggaggagaggctatctctagggtcagagagctccttgccagggtatggtgtcggctggggtcatggtgctggccccccggagagtgtagggatgttggtgttcaagtcttcctagcagcgagttatttactgcagtatcttttcaacgtgcactgatctggttcctagtctgcatctcctatcctagcctcaccctttcttctaccttcccaaccaggcttggatatcctcacctcttagcttagaccccagctgactgccagctgagagtgaaaaggtcacccccaaagcgcctttccattccagcagtttcgggagatacgggtgagagttaggtgggcctggctgcacccctattcccttggctgggctttccttgtctgcctgagctgacctggagccccctgtgtcctgggggcctgggtctgcctcaggggcccacagagggagaagaagctgcagcacagaagctgcagctgggtgtctggtggcttccccttcctgcctctctctctgcagcctcaccctctcgaagcagcagtagcaggaaaggtggggcaggaatgcctggcccgggcctttggccagagctctgagggacccgccccactccattccagagccaattccctgggagttgtaggctctgccaggggcctgggatgcccgcatggcactctcggggcagggtggagaggggagggctgagaccccttcccactcacccttttgggtctgcctgtgtcacctgcccatcgttggctgccctgattttgtcccctgccccacacaggttggctaactccaaagcctcagcgtgtcagagacaaggagagagacagtctgcgggtcttgggctaaaagaccctctaactctccgccccagatacctgatcaggtcatttgggcagatgaacattgccaagtgagggtaccagggtctggtaggggagggctttgttggagtagagcctgtagcctggctgtgggggtaggtttgagcccaggcctctcttcacccctccctttaggcaggacactgcattcccaggtgattcctgcctgattggaaggtccctcactccagggcaggaaatctcaaggctcaagcccacctgcccaccccaagggcccccacccatccagcaggcaccccttcagggtggatggttgtgatcagtgatccctctgtctggttaggggaccatggagggtccaggctcccatccacattgaactctctctcactgcctggcactatctcctctacaactgtcatacatttatttccccaaatgtgactttggatcccatcattaccttgctctaaagtcctccatggctgtccacggccgactgaggcacagtgaagctgtggtcctttggggtgctgcttggtgggctgccctcagaggctgggccctcacacccatgagcctttactctcagggttcctccacttgcctgctgggtcctgtcttccttttcatttcttgcccatcattcgtggctctagcaggaggcctccggactcccccatacctccaaaactctccttgcttacacagcctggttgggtgacagggagtcccgaaccatgggctagaggacagggctgggatcctctgacagtatgaccctgtttatagagactgcagaatccctgaagggagacttgatggaaaggaggctaagaccagggcactactaatactatcctgggcacttgggatccatggtggatatttgagcagaggaatgagcaggccaaactgggcttaaagaacatctaccctttggggaagaaagggttgcttcccttggcagctctgagctctctctctccttcagggacccctcagctgggcctaggcagggagcagggcagaggtcagtggccagtccaggaactcccctttgaggcgatctgggctcactgctcagttctgatgtgggtggtcatggaccttgcttctgggcaccctgcctgagaggatgggcactggccttgctcctgtctgtgctatctagctgtaacctgtgccctacctaggaggccctgagtccggcacctggccatgtgcaaccctgaggaggcagctctgctgcggctggaggaggtcttctcagccaccctcgcccatgtcaacagccttgtcctccagcccctgctcccagccggtgagtctaggctttctagtggggagggaagggcaccgaggaatgatcccagggacaggagacctaccttgttggactygctgagccacagctttctcaacctcaaataggagtggtgacacctggtatcagcatcttctgatgcaggtggtgcgatcttggctcactgcaacctctgcctcccaggttcaagcgattcttgtgcctcagccttctgagtagctgggattacaggtgcctgccaccacgcctggctaattttcatatttttagtggagacaggggttttaccatgttggccaggctggtctcaaagtcttgacctcaaatgatctgcccgcctcagcctctcaaattgctgggattataggcatgagccactgcgccaagtctgactgctccttttttaaaggaacgctgaggggccaggccatgaacctacctgtagcccagaccaggctgtacaaagagatggaattcctcctttcccagggtaaaaaactggaaactgccctttgcttgaattttcatcttgctcccacctagggcacctgatggtgccgggaggggaacaagactgactggaacaggatgcctaggttttacttccagtttaattctcacctgtgaggccttggacaggtgcctctgtgcatctgtgaaatggcagaggactgtgtgaccctgtggacttcacattctggatctgagtagtccaggatgaggaggcccagagccaggggggaattcgtgtatgtacttagttmcctgaggctgtcagggttgtccctgtttagtgaggagtgggtgtgtctcctgtttcctcctcgaggatactgcccactgctccagcctgcccttcccctgctcagctctagggttcaccaattctgtcctgcggatcccagggatgcagaccctgctgcagctccagggctggccggtgctggtggctctcatgtgaacacctggggcctgtgcatgttccctgggagatggagcccacgtcctctactcacagtgtgactgtactccttccccagccccagatccctcggatccctggggcagasagtgcctgcggctcttgcaacagctgcacaagagctcccagcaactctgggaggtgacggaggaaagcctgcactcactgcaggagaggctgcgttacccggactccaccggtctggagtccctgctgctgctgcgaggtgctgaccgtgtactgcaggcccacatagagtaagaccactggaggtggggctggggctcatccctggtgtcagagtgacacctggcattaaggttcacctggggttggggctcacatgggtcagggttcaagcaaaggtttgggctcagtccatggttggtgctcacctgggttcagcctcacctgggcttgggtattcgcctgacagcaggctcagacactccagacctgaggcttggggcctctcagggaagacagactgtatgttagaattgtcttgttggcccaggagttgaggtctccagtgcccagagccaggccactgtgtgggccctcagggctgcagctgactagtgggtgggatctggggatcccagggaccaggggcttaggtctggggctgaggactgggtttgcagggtgtcccctgtgctgcctgcaggtacattgagtcctacacaagctgcatggtggtgcaggccttccagaaggcagcaaagaggagaaggtgagcacagggctggtgcactggcccctgacagggtgggagtgcctgagtgagggtggggtcggggaagccccctccccagagcagcaggtgtcacagcccacaactcatcctggaggactcctggctctacaaatctgcactgatccacactggaagagaaacagggaaggcccagtgaggccaggaacagaatccagacccgctctagctgggctggccttggggcggggaaggaggggaatcccttcagggtggatggttgtgatcagcaatcccttcatactctgagatattgctcttaaacctgtgagggcaactcaggtactgtgttgatctgatagggtagaggttttgggcctggggctggccctgggatctgaggggattagctggggcagggaggtggcggtgtgggtgcaggaatggaggaaggggtgaaggtggtgygtggccctctctacacgcagcgagtactggcggggccagcggaaggcgctgcggcagctgctttcaggtgtgagctcagagggctcggtgggcgcatcgctgggccaggccctccaccagccactcgcccatcacgtgcaacagtacgtgctcctcctgctgagcctcggggacaccattggggaggtgggtaccaggggcagcagcatgtggggaagccgagggaagggagggatagggcccagactcagggggctcagcctatactcaggaaccctagtacaagaaggactcaagccatgccggcaggtgggagagggttgaggaagtcacaggcctgtcctgtggttttcaggggacatgggggacgtggcccagccctgaggagggggtccgaagacatggttctgtcctagggaatcttagtgggtgaaagcactgcccttccctgcggtgtctgaggcacgtggccctgccctggtagagccagcagagacccagagagcaggggtagaatcacgtcctgggaatgaggacacgtgggcccagggccaagctggggaagcaccttcatattccaccccctgccccaccagcagaagaggagctgtcagggagagaagggcaaggtctggcctagattcaggcctccccaccagccgggaccaggactgggctagggaagattccagtaagctctcctctcactggctgccctgtcccccttcagcatcayccarcccgggagctkgtggtgaacgcagtcaccctctttgggaacctgcagtccttcatgaagcaggagttggaccaggctgtggccacacaggctctctggcacaccctgagaggccggctgagggtgagttggggkcctgaggggcagttagggagggggttccacattgggcatggagatgttggggggcttgagctgcttgctgtattctctgggcctcagtttccctatatggaagggggagtgatggctgaagcaggtggctgtaaggtccctctgtccagccatycttatctgtctgctgagcacgtcctgggccaggccctgacccggcctagggaagaggcaatcagcagaaccagtcctctcccctggggatatcaccgatcacacccttgcgtcactgcccaccatggcatggactgcccctgcagggaggagagtcccctgtgccctgaggtttggacctggtgtggagaattaggagactaggtagaggaacgagaattgtggaagggaggmaggggtggccgagtactgggagaggactgataggggcatggctggggccgtggcacagaggtgtgggaggggacactgaagcttcaagagagccaggaatgtataatcagtgcatttctgcctatctctgacccagggtccrctccaggtctactggagggggcctctgggaggtgtctggggtacattgggaggtggcagagtggcaggcagcttgcaggacagaggtgcctaagccttgtactgtcctctttgccccaccaggatgtgctctgcacccctgctcacagactccttcaggacagccaggacgtacccgtgacggtcgcaccgttgcgggctgagcgtgtgctgctctttgatgatgccctcgtcctgctgcaggttggggtggggctgacccaaggtcttgaggccacagtagggttctggggtctggctggaaaaggakcagtaaaggggcatgctgctgggactgagaaagtgggctgggagggatggtcagggatagaaaggcgttgtgttggggaggggcggtccactggagctgtccccagaggagcatgggctgaggggaaaggctgtccagggtttgtcccggcttcagcccttcccagctggtgtccttggttacatgtcttcaccttcgttttcccatcgggaatgtgggggtcattgtgagtgagtttgttctacagtagacaccagacaactcttagttcccattgtactcaaatgagagaggaaccccagacagaaagtcatgggtgactgaggggtgactaaggagggctggatgagaaggcttctagagaaaagtaccctacaggagcagtgcctgggctttcagcattgtggaagtcagaagggagccaggcctgaggctgggaattgttacatggccagtcaccaactgtggttcatccatcctgaaatcatgttgtcctggtgaggtccacagcacagtcttctctaccccttagaaggttggcctggaacccccttgcagacaggtggccggggcctggcaggaagctgctgcccagcctagacctgtgtcccctgaagcctgattttgggattggttctgatttagtttgaattcccctccactcccaacttcacactccactccaggtacactgatgagctactgtcccttccctgtgctagccctctcctgacgctggacctttgcacatgctgttgtgtctggtgggccatctcttgtccctggcctgcggctggcaagctcctcctcacccctcaggcctgggcctcccacgtcctccccattctggtatggagcagtgattggcctgactgggccgggtaggaagttgctacacaaaatcttcccataggaaggggctttttttctggctgtcagagcaggatggcattccaggtagaaggaacagtatgagcaaaagttcacagtgaggagaggttggggcaagctcatgaaggtgtgattgtggagtggccctgatggcgtagtagtggtctgtgaggtcttaaatgttaggctcagcagtgtctcaacccccaggcagtaggagccatagagaggtttccagcaggggttgaccaggtcccagcttcatttgtagaccactctggtagccacagggggctagaggctggttctgagttcctggccaagctctggggtagaaaggacatggaggagctgtccctgaggtggggagcaagccagaggggagagggactcagtcctggacatgctgggcagaatagccttggtggccacacaaggttgagcttggggcaagccttggccagagggtaggtgagcatctggcctgggctctggatgactcctgtgtccatcctcttccagggccacaatgtccacacctttgatctgaagctggtgtgggtggatcctgggcaggacgggtgagcaaccccctcggctgacaccccaggccttcttccctttacccccatgacacctgcccacaccctgggactctggcttgggcccctccaccctcctggacaaagctggggcctactcatcacctccgtctgtctaggtgcacgtttcacctcctcacgcccgaagaagagttctccttttgtgccaaggactcccagggccaggtgagtgtgggtgagctgtgaactgcgggagcggggtcagaggacagggtaggaagagggcagaagtatgcaaccctgcagggccccacaggagtgccggcgagtgtctggcaggcttctggggacctggtcagagtaaatcggggtcaagmattagaatgycaaaaagaacagggtatttttctttctaaagacagaattgggtcctgtgttgatccctgccctgaggtcttgtttggcccctctgggcaggccctgaaactgcagaggagratctcaggttgggtggagggcccagagagtagcaagaagcagttgaagggtccccaaggtgacaaaatggagtaggaggtggagggtggagggggtggtacctggagctaccccagaaggcttcctggagggaaagcctccagcagcagtgatccccttccccatgttccccctcccaccaggcagtctggcagtggaaggtgacctgggctgttcaccaggccctgcatgggaagaaggacttccccgtgctgggggctggcctggagccctcccagcctcccgactgccgctgcgcagaatataccttccaggcagagggccggctctgccaggccacctacgagggcgagtggtgcaggggccggccccacggcaagtgagtggctggagctctgggtggcaaggtgggactccctgggggtctgcrgggcagagagcagcacacaarcctaattgtctcaggacatgttccaggagcrgttactctctgtggacagtcaattctcagagtccctcttaagtcctcttggactgggcctggcccagagacagtctgtgccaaataaagtcttgatggtgacgctagaggacaaggggcagcaaccacgcgctggccttacagcctgcaggtgccattccattcttaggagggtgggagaataattctcacatctgtacctcattgtctggcagtgttgaaatggcttgcacacattctatctccatcggtcctcatgaagacgctctgtatggagtgcttttacccatttcataggtacaaacactgaggcctagtgatgggcataacctgcccaaggtctcagggcaagtgatagggtgagccggcctcaatcacaggtctgtgtgaccccacagacaggcaagcytttatagaccatgtggccccaccccatgccacagctgggaaaacagacccagagagcagaagggactcacaaggctacactctcaagcacctccgctagtttctgataccctgcctcctttcagaaagggctcgagaagacttatgaacaaaaggacagaaaaaacacagaagtggggaggagggtggtagaaaccccacagaccagcattaaacttgagcttgattcttagctctgagcttcctgttggtcaagggaaaaaagggaacctagatgtctccagggctttccttatgggatgtggtgagtgtgccccatgaggctgctggtacagttgggccaggagtagaaaagggctaaaggggctttctgcaaggaatgttcggagctcagacaagagggctgggtgggtgcagggagcccagtccaagggaagaggaagggarggcgtctgagaaagtaggtggctgaggttgctgaggggtgggtaggcctgaggctcgtgaacctccactgtgttccaggggaaccctgaaatggccggatgggcggaatcaygtggggaatttctgccagggcctggagcatgggtaaggctggctgggkctactgctgggaggcgtgcagtgggctgaagggtgctttcctcccctgctgtggtcaccagcccggccccatcctgaattcccaaacctcaagcaggaacttagagacaatccggtccagcccccgcccactgtaccaaaggggaaccgggggcctgaatagggggcccgtctcagctcgaggtcacagagggagtggtacaggccaaaaggtgctccaaggtgctcgggaccaggctggagggaggggtcctgagaggggccctttgaaggataggaaggctgagggcctctgagagtctccctgttgtctggaaggctccttgggggcagggatactcctgggtggcatggagtaggtgtaatgggcgtctcaggtcagggctgatccccacccccacaaccatgctgtcagcttcggcatccgcctgctgccccaggcctctgaggacaagttcgactgttacaagtgtcactggcgagaaggcagcatgtgtggctayggcatctgtgagtaagtgaccctggctggggggttcatgggctgggcccatcctctgggctgagctccatgaggcagagctcgttgttgatggccctccccaggtacagcaccgacgaggtgtacaagggctacttccaggagggcctgcggcacggatttggggtccttgagagtggtccgcaggccccccagcccttcaggtacacgggccactgggagaggggccagaggagcggctatggcattgaggaggatggtgacaggtgagcgccctgcagccaccactcccaggacggaggggtggacmgggccctcacagaccagattgttgcaggacacaggctcctgtttgtcccccactgtgtctctcttaagcccctcacttcccctccagtccctcggttgctgcggaggctcaggctgagcgaatcttggtcacgctgactgcagggtcgcccccgcccctcacccctcctcatggtgttggagaggcatttctgaccccctgctctgtcacgtctaaaaactgcagcccttgctggctctctgggctgtgtgataaagccctggatccttggcctggcaatcacagcctcgcctgcttctctgacctcaccccagctgcgtctcctgggcacccctccagcctttctggaccactgaagtccccacgtatccatcacatgctcctacctccatggctttgcacacactcctattccccctgtccttcctgccacctccacggagaagcctcccagatgcccttcccaggctgcctccctccctcctccattctctattcctctkgggggtcctgacctctctggcactgtgtctgttgagtggattcaggtgatgtcactgccccttatctgcactccctgccgccccgtgccagcagagtgcccaggaggtacatgggaatgagtctgatccaactctggccacattcctctccttccagaggtgagcgctacattggcatgtggcaggctggtcagcgccacggcccaggggtcatggtcacccaggcaggtgtctgctaccagggcaccttccaggcggacaagacggtggtgagtggagtgtatcctgggctatccctctctttgcaccccactcccgctgggggcactgaggctgagctgaggcctttcagggagggatgggaaagggggctgtgttcctgggtgctggagggagccagaacctgggcaggaagccagctctaccacccacctcccctggccctggccaatccctgctctgcctgaccttggtttccccatcagcaactcaggttaagaatacttaccatagactcaatgaactarcaagaatggagcacttgctcatgatgatgcattagctgacattcacagagtcctaacttgacacctggctctgggctaagctcccaccctgatcttgtgggatcttcccaagagccctgcaggttgatgtcattattatcccyagtgtgtccctagtgaatgacaaatgagaggttcagagggatcagaggacctgctccatgtcaccttcactgagtggcagagctgacactcacaccctggtctgctgagcctggccgccgagcctgggactcccatgtttgcctcacccatacccttccaggtgcctggggaatgtggggctctggcctgatggctgttcytgttattatggtctgttggtttgtttatgctctacttcattctcgaaaggattgaaggaggccttcaaggaaagaggaagacaaggggaagaataagtacacaaaayagatttggaaataagccgaacactaattgtaaccctttcggctctgagcttcccggcagcccatggggcaagggagcctggtcagctctgccgttcccagggccagtgacaagcagggaagcagggatgtttcagagaaagccccacatttcttgagctcccaagggcttcctgaagaagccrctggggtgaggagccagggcggagggtgtcatttggggaaatccagggatggggtcctcggggctggtgcttagcaggccaaaggctagagtcccaattaggtacagtcctgtggggcgtgatgaggctcagggcccctctcgccatgtgtcagggcacatctcccttctttggccatctctctccaccctgagtttcctggcccttcctcacccaccctttctaccctccctggcttcctctccccaagggcccgggcatcctcctctctgaagacgactccctgtatgagggcaccttcaccagggacctgaccctcatggggaaggtgaggaccactgaggcccccctccacaccctgccaaggccttggttggtgtctgtaatctccccacttagactcagggctgggggcaggtaggggagggcctgtcccacctcccttggagccaaggagtgggcacagcaactccaccctgccacagagttgcgattgattctggagtgaggtgagaggggaccagtggccttgcctgctatccagagggtaccggtggtctcctggctgtgtccctccataccctcctagttcagaatacacgccctccaccagtaccagtgcctcgagcagctgtccctggaggcactggccttcagtgtgtgcctccctgagctaacccaggaaaaggcaatgtgtccccgctggagcctttggaaatgtaggggctgttttggtttcataatgactggagcaaaggggtggagatcaggttgctatgaatgggacagcctcatgtggcaagacaccgccctcctcaggcgttgcctgtccctgggcttacccccaccccagcccctcagtggtggtctccccactcttgcctgtgagtcccttctgcatctctctcctcttcctacctcagaggtgagcgagcccctgagacgtgggcacagctgttggtggggggctctggcaggcatagaggattatgaacccctcagcatggagcagcttgaatggatggcgggaagcccattcattagtccttagcctctctgacactgatggacaggcttgtggcctgtcatgattggctggaagggtaactgggcagacagacatccctgctccttctcctggctcccagggcaaggtcaccttccccaatggcttcaccctggagggctcgttcggcagtggggcagggagaggactgcacacacagggtgtgctggacacggctgccctcccaccagacccragcagtacctgcaagaggtgagtgcctggcccctctggctctgggcctatctggggatgtgtctgtgtttccatcccaaagactcaggtctcctcagaggggcctttttgcacccacctcttagccctctagagagttccgagagcccagggtgtacaactccagtcagagactcttgggatcaggggctgtgtggatataatgcggtacaccacaaaactggagagaaatattatttgtaggctttgcttaggtcctgcttttttttttttttttgtctygaaaggatacaatacggtttacaaaccaaacatacaggaaaaaaaaaatagaaaataagagcatatgttaaccttaaaagaaagggatatgtagacatgtcctacggcatttacaactgatcattgagcctggctctgagtttcctggcagccaaggtaaagaaggaaacttgctaagtggaatcacagtcattatcaaggagtattccagagraggatagacttcttttcctgtaggaacagagttcctccttggaaaacagttgctcttgttgcgtctgttgaggaagactcagtattgcacagaggaaggaatctgtgtgggtggcagttctaatgggaagtggtcccaggcagcatttcagatgtagggagggagtacagttgactacttggcccgctgtccctgcatgctgcttctccctgacagcaggagctgggagtggacagcaatccctaggggcaggccccagccygggtgtgagtgtgggctgygtgtagcctacgagcatgacactggagtgcagggctccattagacatgcgcagccaggccccagcctgttggccagggcgggatcaaccacaggaaggaaccagctgtaagggagggcagagggggatgtcttggaggggaatcccagactttggacactggtctctcttggaccaagaccccctctctggcttggcctccagatctgcccacctttctgtctccgtctttccaggattccatatgcttctgtctgtcttctcgtcgcagggtagattctctgtccctttctctgctgctcttcctcctggagccgtggaggtcagccccctctgcatggttcaatccatccacccttcttggggcttgatcctgggccaggctcatacccccacccctccaagggcctgggcagagtcctgcctacctcagctccatctctctctgccccatcacccaccctccatccccatcgcaggcagctgggcgtgggtgccttccccgtggaaagccgctggcagggagtctacagccccttccgggactttgtgtgtgctggctgccccagggacctgcaggaggccctgctgggcttcgacgtgcagagctccagggagctgcgtaggtctcaggattacctgtcctgcgagaggtgaggccggctgtgtgagcatgcacaggttagggtgggcyggggagggcttcctggggggagggggctgggccgaggtgtgggtgagggatgctgtgtgtggtgcccaggacccaccctgaggacagtgtgggcagtatggaagacatcctggaggagctgctgcagcaccgggagcccaaggccctgcagctgtacctcaggaaggtgagagccctgctggggtggccaagggggtgacattgtcactgtccctggtggggaagggctcccatttttcatagcagggtgctgactgaaggggacaggcctgtggatcccttgtcctcagaggacctcagtgttctcgtgtatgagatgggagaagtgttgggaggctggcgtgggcatgctgtgctccagaccccrgtgcttagtctctctctgttgcctatgcactggcccaggctctgagcaactcactgcaccccctgggaaagctgctccggacactgatgctgaccttccaggctacctacgcaggtgtcggggccaacaagcacctgcaggagctggcccaggaggaggtgaagcagcatgcccaggaactctgggctgcctacaggtgggctcggtggcaaacgggacagctactrccctgtgacactagtgtgccctttccaggcatcagttctgccttgcatttgggaggaatgccaagtgtctgattcaacaatgaaccagaggcttggtcagtgtgcagctgctgagcaaaagggttagagggtggggaggtgagagcaaaggcccagctgcagccctcagctagagtccaagacccaaccaggcgctgggctgactctgaccscaggtgcactctcaccccactgtaggctgagcttggccctggactcggaacacacctgcagtcccaggctgggctgtgaccccatgaaacactgcaaatagaagccttagatgctatagttccttctgctgctggattctcaggctaacatcctggagctccaaccttctaacttctgtggtttgagaggatgaaccctgcaggccatgtccacagttctgagaggccacctgcttttgcctttgttgactggtggtagaactccagttctgtggcaaggggcagccacacmatttctctctcattgactcacaggggtctgctgcgagttgccttagagcgcaagggccaggccctggaggaggatgaagacacagagacaaggtgactggcgcaggtctccttggggcctgccgtgtccagggaggcctcatgcgtctgctcctaggacctcccttggggaaagaggtgcttctggggaagtgctgggcattcactctattgaccaaacattgtgcattgatcgtttgtggattagaatgacccatgacctctgttctgtgaggaaccagggagggggcactgctacaatgcattgaatgcatctttgttctaaatgtatgatcccaatctcatctttcgcatgcagaaggtgagtagctccccgaggcaccctcctctccctgcacacagatggggaaaccgagggctggtagggatgagcctgaggttatacaggagttaggtgggcatgaaatttgtttcccccagtccctggagcaaaccttacaatttgcctttagattctagacctgaaagtgttcctgatcagagaggccttcctgtcactgccttgcaggaggcaagggaaatggggttagacattagggaggattccccgcccggagtcctagcacagcaaaccaggaggtggaactgaatcagcctggaatggctgctgagagctcagctgcaagttgctggtccatctggggccctggttttgctttcagtcaaatggggatccaactcctgccccacctgccatcttggttgtcaaagtcaaaggagggaatgaagttatgaattgaattgggcaaatgatgactgagaacaggcttggaaaaggttttctggggaggaggaggctggaggccaggacactgtttgttgtggaactaggagctctttgagacgagactccaagtagtaatcccagaccccaccttgctcatcccaacctgttccggtctccccatcagggacctccaggtgcatggattggtgctgcccctcatgctgcccagcttctactcagagctcttcacgctctacctgctgcttcatgagcgggaggacagcttctacagccagggcattgccaacttgagcctctttcctgatacccaactgctcgagttcctggatgtgcagaagtaagccttcccttcccccgtgccgtgttagccaggactcaaactcgactcagactgtcttcagccaaaaggtggggctggggttgataggttcatgtacccaccaagttctaagcttatgcattcaggtgtggctggatctaggtgttcaactgaatgacagagggaagcaccttccatttctgttggtctttctcagcctcccccttgtggtgacaaacaccataagcaccaaccgctcaaggttcataccctcccagctcctctcccagagtccccacaggagctggcattgccttccaacagctccctcagagcccctgaagtccctcactggctcggcttggggcttgggtcttgagcccacccctgagtgccagccgtgattgaccaggcctgcctgaatatccactgctgaggctggggcaagatcacctgctctgagcacttgggctgagagtaggggagaggaggtccctcaggggagactgaggactgctctgggtgcatgtcgggaggtgtttaccacaccccagggcctcccttccaccctcagtctccaaaatgtcctttctcttcagtgtcccatctatccattgatgccacaagtgaccccactgtccacagtagagggcacgggcactgtctctgctcccacatccaggtctcctttgttacacagggatggtgcttcccacccaccctgcaaatccctgtttcttcctctatcttggtgactgtgtcctgcatctgaccagccaccagcctaaagacctggctgccagtgcttcccaagcatgccccgcctccctcaccacctcagtgtcgcttccccacaccagcctccacctctgctgcatgagggctgcatccccctgctcacagccctgtgctggctcagcagagcctcctggatggagtgcagtctcctcacccctccctctctactggtcaccacgacctggctcatacaagcccctgggccgcccttacctccctggagcttctggagctctgccttctccaggaatccttccatcctccccatgacctaggctgatctccttccccttttcaggacccagatctgccgggggaaacagtggcatagggaatttgccctctgacctcagactctgccccttgtcgaggcagagcctcctgtctcactttttcaatttcaggcacttgtggcccctcaaggacctcacgctgacgagcaatcaggtgagagsgaggccagagccccaagccaggggcccccagaggtcctgcaggctttgaggagccctttgcctcatgattgctgggcggaggctgcagaggagctggggaggggcagggtggcttgggaggagacactgtcattctgacctcccagtgtggtggaggtaagctgttggcctgtaaccaccaggctcaaacacaggttcttacctggctgtgtgaccgtgtgcaagaggctcgtgcaccgtgcctcagctgcctcatcagtaaaagggagccaacactagaacaacctcaaaattcttattttatttatttatttatttactttttgagaaaaagtctcactttatcgcccgggttagagtgcagtggtgcgatctcagctcactgcaacctccgcctcccgggttcaagtgactaacctgcctcagcctcccgagtagctgggattacaggcgcctgccaagtgctcactaccatgcccagctaatttttgtatttttggtagagacaggatttcaccatgttggccaggctggtctcaaactcctgacctcaggtgatctgcttgccttcgcctcctaaagtggtgggattacaggcgtgagccactgcgcttggccagaaccacctcaaaattgttgtgagggtgaagtgggcacatgaggcagctgttctcaaaatgtgcctgccaggctggaagcatcaggatcatctgggaacctgttaggaaagcagattcttggaaccacctcagacctaccgagtcagaaatgcagggagtgggcccgggaacctgtgtttcactaagcccttgggtttgagaaccatcgacataggcactcagaactgggcggcacccagtggccagtgcctgttatgattattatcttcttatccgtttggatcctcccaacctcatggagactattcaccccgttttatggttgcacaaactgargcccacagtggagctgtgacttgccctgggtcactcagccctcagggtggggctgcactaaagctggcagtgaagggaagggtggcgggggactcaggcccggccctgggaaggaggggatgtcagagctggggggccatggcctcatccagcccactccctccaccatgcagaggtactccctggtcagggacaagtgtttcctgtcagccaccgagtgcctgcagaagatcatgtgagtgtgagccgtagtgggttgggggtccggaggcagagtgtggggtgctcctggttgggactgaaccaagggccttgacctggagccagctaccctgctgcaggaccacggtggacccacgggagaagctggaggtgctggagaggacatacggggaaattgagggcacggtgtcgagggtattgggccgggagtacaagctgcccatggacgacctgctgccacttctcatctacgtggtgtcgcgcgcccggtgaggcagtcaggagctgggggtgcagggcaggggcagggtcccacccccaaccacgatatcttctgatacctctgaaccccagggtttatggatgcagcttctctctgtacagatggggaagccaaggcccagaaaagggagggtcccagccagggtgctggggtgctagaggtagagtgaggaccacaccccaggtgtccagccatccaggccagcgctccttccccagctgcctgtccgcgacaggcctcttctccttgtctccctcgctctcttggtggggcggtgttctccagaattcagcacctgggagccgagatccacctgatccgtgacatgatggaccccaaccacacaggaggcctgtatgacttcctgctcacagccctggaggtaagggacaggggctgtggaccgaggtggaaatgccctggcccctggggcagacccttttcccttcccagacatcataacaccatagtgggagggagctcaaattcacagctcatgtgtgactctgggaagggtcctcacagtgtccctgatcctgctcttattaaaggagccagggaggggtcccacagtgcatcccagccctggggaccctggggccatgattgctccatgctgcattcccaagcacagtgggagaggaagggccccattttcctcgcagactgtggctgagggctgagttggagacacgcctcctctgggttgggaggtgggtgcacacagctattgagccctagatcctgtgcatgtggttgggatcaggcaggtcaactggcctcagccttgcctctctccctccagtcctgttacgagcacatccagaaagaagacatgaggctgcaccgcttacctggccactggcactccagggagctctggtagcctggcctttcctggacagactgaagagctgagcagggcactgccagcctgtccctcattacccaaggcaaggggcaggacaggccctcagaagcagctcttggaggagatgagcattttgttttgcacaggaagatgctgctgctgccctgactgggatgagggtgaggggtgacgggtgtggccctggatgtggtggttttcccttggccactagcccatcttcaatgaccccttaatctgcagcagctcacaggctgggggtgaggagtccctggcttctcttagcctgagcctttctcccaagttccagagcctctccgggcctcagtgctgccatctgtacaatggtggagtgagtacgctgtaaaggaccttccattcattttgctgaattccagagtccttttggaaaactgactttagtctgctgggctgtattgacctctggcaggctcgaagcctcactgggtatgcagtcaacaggatgggcctggagatccgtgaactgcaggccacgtacccatgacgtaaacggcggcactggagcaagctggggcggggggtgggtaaaccctcactgccagcaggccccaagtggcttgtaaatcattctcctgtgacgtctgtgggcctgcgtggggacaacaggggcacatgacatctacctgggccctgaccaataaaccctcagacccaggacccaggaccctgctgtagttggggagcaggagtacctttgggaggggaggactttatttaaacagtggttctagtgtgggaccaagagaggcaggagctgggtcttggggcagctttattcctgttgggcctcagt

SEQ ID NO: 94448 - DNA, 21417 bp, Homo sapiens
tttgcacccagattactagaggttatttttttcaccaaattattctgttaactctcagtgtttttcacatgctcttaaaacgtcttgttagaaattcccttggatagccctgacctgattttatttgttcatattttaaaatgctatcacagacctaaattcacccttaaagtagagaccactccagaaattaaatcagctccaatgactgaaataattgcctgcatctgggtctgctggctgctaaagtgtaaaagagtaagcatatacactaatggcagatgcacttttggggagtctgtgaattgggaatgctttggaaatgaagagttttctaacctccacaaaaatctgcaaaaattggatgacagattaaaaataaaactttcagctgctttgctgttacctgaggaaatagctgtaataaaagtagaccaccattcaatgcacaaagacccagaatttctagtaatactttagctggccaccatgctaaccccagtagcgtcaccaagatcaatgctcctgcaaatcacacagaaaagaggggtcttggaggattcaaagaggccatttttaactgtcagagacaaacccctgattcccaaaagtagaaaagtgaaaaaatctggaagtgggaaaagtttggatgttcatggcaaaagagactatttgatgctgtcaggatagctgacacataatggcgaatgatttaaaggggaatttcagaaaaatgctttgcgatattactcataatagcagggacaaattggcaactatactaaatcaacattggtgggggtaattttagaggtatttccaaggatattttaaaaacttgtcctactgccaacaatgcgatcctagcaaatgcaaaggtgggatatgaacaagaactaagatctcgagggcccttcagacctccaatcactttatacaaatgcctcctgcaatggactataaatatgctctgattattttggtttttttttttctccttcaagatggattaaagcttttccttgccggagagttatggctgttataactgtggcaaaaatttctgcttgattttgttttccaacctggaatttccacttatttctctaataatgacaacgacactcattttactggtattgttattaaggaactctgtaaagtttgccttttacccaaaaactttactgtccttatcatccacggtcctcaggaaaaacagagagaactaatgaaatttgacagctaagatgaacaaagctcccttaaactccaatggtctaaaatcttctcttttccagctggaaccatagagggtgtcaaagagaagaagaagaaggttcctgctgtgccagaaacccttcagaaaaagaaaaggaattttgcagagctaaagatcaagtgcctgagaaataagtttgcccaaaagatgcttcaaaaggcaaggaggaaacttatctgtgaaaaagcgaataggcagatgtacagaactgaaatttgaatagtgaggggggcaagaaaagctggcaacttctatgtacgtgcagaacccaaattggcatttgtcatcgggatcagaggtatcaatggtgtgaacccaaaggtccaaaaggtgttgcagcttcttcgcctttgtcaaatcttcaatggaaactttgtgaagcttaacagggcttcagttaacatgctgaggattgtagagccatatattgcatgcgggtacccaaatctgaagtcagtaaatgaactaggctacaagcgtggttatggcaaaatcaataagaaaagaattgctttgacagacaacgctttgattgcttgatctcttggtaaatatggcattatctgcatggaggatctgattcaagggatctatactgttggaaaagtctgcaaaaaaacaaataacttcctgtggcccttcaaattatcttatccacgaggtggaatgaagaaaaaggccacccattttgtagaaggtggagatgctggcaacagggaggaccagatcaacaggcttattagaagaatgaactaaggtgtcttccatgattatttttctaagctggtcagttaataaacagtacctgctctcaaattgaaaaaataaaaataaaataaaatcttacctctagcttcagtgtgtataagatcagccccttctgggacccacaggttacctccttatgaattaatacgaggccaagctgggtgcggtggctcgcgtctataatcttagctattcaggaggctgaggtgggagattgcttgaagccaagagtttgaggctgtagtgcactatgattgcacctgtgaagagctactgcactccagcctgggcaacatagcaacaccctgtctctaaaaaaaagaaaaagaaaaagaaaaatggcctgtccatgtatttgaaaatttcaccaccaatctttgatttggtcctattacaattatgatgaaatatgattaagaattgcaagggcgtcatagaataccttcagctttatcatcaacagatatgatcttcatttccaaacaactcacctgtgattcacaacaagagatttagtgttctggaaaagacctgagattaactgcctttgatcctcgaggaaatggaccttatcagatacttaacaactgacccagcagtaatattccaaagtatggatccttaggtaaattatttcctagctcaaaagacatacaatatttcctcctgactcttggacacccattccactggaaatcttaaactgagattcttaggtatgctccagaagatgctgacttcagaggtggatagcttctgcccagcactttggataaggattaacaatctgactcaacaccctttcctggctattattctactctgaagccatctaaaatattaatgttagcttcctattttcatcctattatttatttatttatttatttatttatttttatttaaaagccagggtctcactctgttgctcaggctagagtacagtggcacaatcatggctcactgcagcctcagactcctgggctctagtgattctcccacctcagtttcccaagtacctggtatgatgggcacaagccactgtacctggccctcatcctgttacttctgacctcttatgttctctatctaccacttaacagaaaacaaaattttcttatacttttttttcccaaaccattgctgccactctgaatctaacaaccctgctgacaaaaatttcatagctgtccttttaaaaccttcacaaggcaacctccctttaactggctccttatggtaattatgtttcactcacatcattcatcccaaccttcagtcttgcaacaattgtgcttagacttcgtgccaacaaattgcttctgctgaggccattacaaggccaataaatcaggactaatattgggtctattctggctaccacggttgtttgctttcttcagagacatctgagcctgctttgcagaaactatttaattccactcaaggaatctgtccatcttgaggaacacaaaagtgactcattcctattgtaataaatgatacttaataccagtataatcagtgctccactaaaatcctgtttcttacatgacatcaggatcattctgtccactgctaccctgtgattccaatgaattgttagagattgccagatatttaaaactatcatcccaccaggaaatcatgttttcttgaaaaagatatacagaagtgcccaggcgcgttggctcacgcctgtaatcccagcactttgggaggccgaggggggcagatcacctgacatcggagttcgagaccagcttgaccaacatggagaaacagtgtctctactaaaaatacaaaattagccgggcatggtggcgcatgcctgtaatctcagctactcgggaggccgaggcaggagaattgcttgaaccaggaaggcggaggttgtggtgagccgagatcgcaccattgcactccagcctgggcaacaagattgaaactccatagaaagaaagaaagaaagaaaagaaagaaagaaagaaagaaagaaagaaagaaagaaagaaaagaaagaaagaaagaaagaaagaaagaaagaaagaaagaaagaaagaaagaaagaaaggaaagaaagaaaagaaagaaagaaaggaaagaaagaaagaaagaaggaaggaaggaaggaaggaaggaaggaaggaagggaaggaaggaaggaaggaaggaaggaaggaaggaaggaaggatacccagaagcttctaaaatgaggaaagcacagataatctggtggaccatccaggaaggataattgatttctctcatacaagatgcaattcccatagtaggaataaaacaagatatatgcagcaaaatttgacagaattgaagggagaaatagacagttctacattaacaatgggaggctctaaaacccctctttcaattatggaaaggctgagacggaaggtaagtaaggaaatgcagaatgtgaacacacaatgaaccggttagatctcacaggcatgcagaaaataacctgacaacagcgtgcacattcttccccagggcaccacttccgcctccctcatccccactgctcccgatccctgtccacagacccacttcccgccctggtgtgatcctcgtggccactgtggcccctactttggagatcctgctggtccagttcttcccgccttccgcagagccgtactcctccttctgaagaagccacctgggacctgggccccgtcttcctggctcctcagagtccttgcaacagcaggcaccgcttctctctcctacactcaacccctctcccactccactgcctctcagtgtgcaaaaacagtaagaagtgtcccgtattttcaaaatctctcccctgtagttcccacctgacttctagtcgtaggtggccaaagtacagtgtttttgaaggattgttttattcccagtgcctggaatatggtaggatctcaacaactgttgtttcaataaaggaatgaccaaatgggtgaatactaatgtaacaatatcaattctgtttctttcataattattctcataagtgttagctttcttaaaaaatcatcttcacaattggacctagacattttatctttcccagctcaagatggataaactcagaatgacaggccaggcaccgtggctcatgcctgtaatcccagcactttgggaggcggaggcgggtggatcacttgagaccaggagttcaagaccagtctggtcaacacggtgaaatcccatctctacagaaaatacaaaaaagttagcagggcgtcgtggcgctcgtctgtaatcccagctgctcgggaggctgaggcaggagaatcgcttgagcccgggaggcggaggttgcaatgaaccgagatcgccctactgcactccagcctgggcaacacagcgagtccccgttccaaaaaaaaaaaaaaaaaagactcagaatgacacattcttaatgtcttaatgtataatgagaagtataactattcagaagtccaagcacttgtgtgtgcatggtgctatcgtcttgctgtaggcaaacctacatgggaatccaccttgacacataggccacttcctgagcctggacccagtctcagagctggggaactggcccaatgcaaaagggtcgggagcatctgcaacagagactgagctctatcagcttcggtgacatagcctccattcacgctccccaactcagcagagagagcacaccatcagacttctaagacttagtagccaagaagtgttgaattaaactctctgagacctctctttagtctgaccctggcagcctcagtctcccagagcctgtgggaactcggcagccgagaggcagaaggctgggcgacgtccggagaagaagaaacgggggaagaacttttctcttacgatctggctttactctcacgcgcacagccgagtccctggggacccagcagaggtccgaagcggagcggggcggggcggggctacggaagctggcgaggccgagcccctcctagtgsttccggaccttgctccctgaacactcggaggtggcggtggatcttactccttccagccagtgaggatccagcaacctgctccgtgcctcccgcgcctgttggttggaagtgacgaccttgaagatcggccggttggaagtgacgaccttgaagatcggcgggcgcagcggggccgagggggcgggtctggcgctaggtccagcccctgcgtgccgggaaccccagaggaggtcgcagttcagcccagctgaggcctgtctgcagaatcgacaccaaccagcatcatgtccatgacactggggtactgggacatccgcggggtgagtgagggtccgctgcactgtgggaccgggcgcgtgggcgggaagtgccgagcggctggggaccggctctagggacggttccctccttagggctatctctcacaggagggcctgtgcatgcctgtgtgtgtgtgtgtgtgtgtgtgtgtgtgtgtgtgtgtgygtgcgccggggtggggggggggtgcagtgcagtgtagactaggggctcacctggtgcagagaaagtcaccaagtcagggaccctccatctctgacacgacctgcgggccatctcttccagctggcccacgccatccgcctgctcctggaatacacagactcaagctacgaggaaaagaagtatacgatgggggacggtaatgacacccttgtgtccgggctctgcccactcacgctgagttggcaccaagcaacccatggtggccacctgtggctacctctgcaggcctcccctgctggagctgcaggctgtcccttccctgagccccggtgagggagtcctgtggccttgcaaggcagaatgctggggcgggatgctgggccccctgtttaattgggttgggtgtccctcagagcttccctaaaccctggaagccttagccgtgtggggtccagagccctcagcgggattctttgtccctgaaccctgggatgtgggactgagtggtcagattctagatccacctgtctcagggatcttgccactggttccttgggagggtccccgggaaggagggctgggctctggggaggtttgttttcacttcttcttccccacggcagctcctgactatgacagaagccagtggctgaatgaaaaattcaagctgggcctggactttcccaatgtaggtgcaggggaaggggcggttttgggggaaagtgcgacgtgtctctgactgcatctcctctccccagattagaggtgttcggatcaggagtcttctgcccaattcctctcactcctggttgtctacacagcccctgcatgatgttctgtgtcccagctcatttgttcatgtgacagtatttctatgtcaggcctgccatgagcgggcacagtgagtgcctggtctcccctctgcccttgcatatgggaaggggatgctggggagcctgctggcccaactgagcttccccggtttcccatctatccagctgccctacttgattgatggggctcacaagatcacccagagcaacgccatcctgtgctacattgcccgcaagcacaacctgtgtgagtgtggttggctgcagtgtgtggggggaaggtggcatcctccttggctggattggggtgctaygctcagagtgagtctgtgttttgtgggtggcaggtggggagacagaagaggagaagattcgtgtggacattttggagaaccaggctatggacgtctccaatcagctggccagagtctgctacagccctgactttgtgagtccctccctggtctggaccagaagccaggcttgtattcccatctactctggtcctattcacaatttgaactcctcactgctattgatcctctgagggttccctgtactgtagcagagtgactgtcatatcattaaacttataaaataaaaacttgaaatcagtccccaccaatcataggaagtcctatgaaagctagcaattcagttcctagacaataaagtcatgcgttcagaattcccttcacctctgacccctgacctctgccacgggccatctaacccagctggttcatgccatctgcctgttcggggaatacgcagactcacactatggggtaaagaagtatgtagtgggatgtaatagcaccctcctctgtggaattccgtgctattcttttcctagtgcttctccttgacacgcacagggatgaatgcattttcctaacaggcagctcaggggcggccagagggcctttgttcctctgtctccttccatgcagcctctcaaaatctcatctctccagaaactactcaatgtccattgtattattctgccactgcactaggaggaactttcaacttctttctctgagctcctttagttctttgtatccttgattttgctcrtgtctgggtccagagcctgccaggtactcaggtgctcctgggctgacccagaggagggtggttgggaggtcagtggggacagattcagggatagtgttgcattcctctctgccttcccatcaccacaaaagcctccagctacccatttggagtgtaataaatgctggtatgtccagctgaagccagttccagctgtggggaagatggctgcttgctcgtggccagctggggccatacacagccctggggaggccacatctgtgcagggagcttgtgtctgagggtggtgacagctgttttctgcctcaggagaaactgaagccagaatacttggaggaacttcctacaatgatgcagcacttctcacagttcctggggaagaggccatggtttgttggagacaaggtaatgggggcatgtgatgaggacactagagatttgccatacatcctaygttacagagattccagcccacacattcttggccttctgcagatcacctttgtagatttcctcgcctatgatgtccttgacctccaccgtatatttgagcccaastgcttggacgccttyccaaatctgaaggacttcatctcccgctttgaggtgatgcccccatcctcctttctctttgatgccccttgttccgttacctcctttcagatgctttcccagtcctggakctrcataaagaataacttgcatttattgagtgctggcttcatgccaggaaccttgcccagcacattatacctatcgtgtggaatttgaaatttccaacattcctacagggtgacagaattatcttgcccatttagagataagaaaactttgaatgagagggtcagtcctttgttctgggtcccagagccagtggaggctgtgctgggctccctgtgagcatctggatctatgggtggcagtcagggctctcccttttgtgacaaaagaaagaagcctcaggcctcatccagcctggatttcacagcccagggcactttggaagaggcagagaactttaggagcatggatgcagctggcaatagtaggactgacacacggtggcattgacgtcgagtacgaaacccacaggcagtattcatagctactcccagaagctttgcacgatcagacccccacgtggggaatcctgagagccagagctgtggccagagctggattagggtacatatgtgggtgcccctgttgaaggagtgtatgttgaagtgctctgtgctggggcactctccttctttatcttttttcctctcttttttccctccagtgttccaagtgttccccctgtgagatgagtagcacactgattttactgctattcaccgaccttctcctctgcatgaggcagggtgtgaggcacagtgggagttgcatagatgactgccccatcctggaaatgagtgcagtgagaggcctgcaggcagagcagcctgtgaggtgtgtggcaccacctgggtaccaggcctggggcctgcccctcactcatggggaaccatccctcacccgtgctgaatttgtttgagagcagcaaatcctacttttagtacagatgtgagaatttgaggcattagtccaacaagtttttcagcctagaatttgttttcctttcccactacccatcaagggatctggttactcagctagttcccatcagctctggctgtggtctcggctgagtggccttggggttatgtaagaggtagtgggaggggaagagagctgagggctgcagcatatggtccacctgggcttggccctttgggaataggcagccctggctctctctgaatccttagaaattacacggctatttgatcctggaaagatcgtgcagagcacacctgagtgtcatacagcctggtctgaggtagtggggttggagatgaggtgggttggggcacagtggtgtttagctcaggtaccaggtggggaggtttagactttctgctttaaaaggaatgattagagcctggtctggcgtttcttttgctggtccaacacaccttgaccactttcatccaggttttgccaggtccttgggtgagatctgggctctcttccaggctgcacagacattttcagaggtcccctctgtgtgtgcaaacctaggcaagccaggtgcctccctgtgaaacaggagaatgttgtgtagtcagagagtgacaggacctcctgagggatttgggggaggatggggatttgacagaaagagkccagaactggagagagacagaaccagtctacgttgcagctctgtcccccttagtagctatttgagtgtgaggaagttactgaacttctgtttcccacatgagaaatggtgataatagattcagccttgcagagtagtcgagtgggttttctaagcttatgttgtaatttctcttgggtacagagcacccagcaccgkgtagaatcttcataagtgttagctgttactgtggtacaacattacttaaaggaagttggaagagttaactccgcaaatctggggaccctaagaggctgtgtgatgcctcagcacttgagcccacgtggaaaggctgtggccagggccctgacctgctgtgtctgcagtggggttgtcccagccctcatgggcagctgaccttgagttctggccttattttcccccctctcagggcttggagaagatctctgcctacatgaagtccagccgcttcctcccaaaacctctgtacacaaggrtggctgtctggggcaacaagtartgccttgaaggccaggaggtgggagtgaggagcccatactcagcctgctgcccaggctgtgcagcgcagctggactctgcatcccagcacctgcctcctcgttcctttctcctgtttattcccatctttacycccaagacttyattgkscctcttcactycccctaaacccctgtcccatgcaggccctttgaagcctcagctacccactwtccttcatgaacatccccctcccaacaytacccttccctgcactaaagccagcctgaccttccttcctgttagtggttgtatctgctttgaagggcctrcctggcccctcgcctgtggagctcagcccygagctgtccccgtgttgcatgacagcattgactggtttacaggccctgctcctgcagcatgsyccctgccttaggcctacctgatcaaaataaagcctcagccacatttgctatagtcttgtcttatttgctcctggctgcccagactgtgtctgtcactgcctcttctgagggactggctggtgaccctggcagtagctgggttcatagagattatgatgggcttagtaaggtgtttccaactttgttttttttttgaaataaggtctcctgcttcccaaggtgaagggcagtggcggcatcgtagcttactgcaacatccagtcctgggctcaagaatcctcccacttcagcctcccaaatagctgagactataggtgtgccaccacacctggccacattaaaaaaatttttgtagagatgtgtctctttaygttgcccaggctggtctggaactcctgagctcaagcgatcctcttaccttggcatcccaaattgctgggattgcaggtgtgagccaccaygcctggccctgtttccaacttcttgatctcttttctgactgccttagagcaggaagccacataaagtgctctatagaaaggatgcctctttctgggcctagatcttcatttatttttatgtattcagtattattcagtgctttccatggttaggcagagctaggtctcagtgagtacrtcttagatgcccagaggtggtggaattcccatcacagagaaccaggatccttctgtcttccacactgactgactccatcacagcttagatctctaggacscaagctctactgtgagctgcttcaccagaaggttctcccactcagcagttcccaagctgtgttatcacaaatagttgttgattttgtgggttaggaattcaggtgatgcccagcagggagaacttattacaaatcaacaaaggtcttttctccaaaaactatatatccagaaatacggcccattaaaaaatgagtcaaaacttgaacaggcatttccgaaaaatgaatatccaaattgccaacaagctcatgagaaggtgctcaacattattagaaagcagaaagttaaaaacccataagatcctactgtatccccactagaatggctgacattgaaaggactgacaattgctggtgatttatgcagtaactggaactgtcatgcattgctggtgggaaagccactttggaatactggcagtgtcaactagagctaaacatacatctacccaggacccagaaatcccaccctataggaatgagtcttaatggattccaagagccaggtataatgatgccaaaagcagctttattttaaatagccaataactgaaaacaatccaaattccatgaatagaagaatgaacaaataaactgtggtttatcaacataattccatcattcatrtaatggtatatttactctgctataatgaaaataaacatgctaacactatgtgcaaaaacatggatgggtctcacagaagtgttgagtaaaaggatccagacaggagaaaggacacacgatctcattccacttacacgaaattcaggagagggaaatgagtccatggtatcagaggtcagatgattggtgaccttggtgagaactggaaggttgcctattgaaggctcctggtgcagtgctgtaagttttctctctttatctgggaggtgattccagaagagtatccaagtggaaaagcccacagagtagcacacttaaggcctatgcactgtatgtattacacttcaatgaaaagcatgcttggccaggtgcggtggctcacgtctataatcccagcactttgggaggccgaggcgtgtggatcatgaggttgggggtttgagaccagcctgaccaacatggtgaaaccccgtctctactaaaaatacaaaaatcagccaggcgtggtggcagcgcctgtaatcccagctactcaggaggctgaggcaggagaattgcttgaacccaggaggcagaggttgcagtgagctgagatcrcgccactgcacactccagcctgggcgacagagcaagactccgtctcaaaaagaaaaaaaaaaagcatgcattaaggcctgtgcactgtatgtgtattacacttcaatgaaaagcatgctcatatgtcttacattatttgtgtgcttgtgttggtttgctttccctcataagatgtcaacgtcctcaggacatgtgtttttgtctcttcttgttcgctgatgtaacaggtgtttgcatatcacctaggacagtccctgagcatagcaggtgctcactgaatagttattaggcaaattataggctctatcttaatggtgtcatttcaaattccctttagatttttatttatgcctacttctttggataggtgagattgatgggcacatacactcttaggttctgcagttttttctctttaacattttacctaagaatctgtacatgttggcagtctatatgcatgcctatttctagcatttaatggctatcattacttcctgtggataaattatagtttgcttagtcattcttaccctattgggcatgtggatttttctcatttatttatttttagaacagagtgatcatgtttaaactaattccttctctggtttttgggtactttatttgagttggtccccaaaggcaattactacaaggcaaaaggtgagaatggtgttatggtattatcatagataaattgctctctagagagaatagctttttttttttttttttttgatgtggagtcttactctgtcacccaggctggagtgcagtggcacgatctcagctcactgcaacctccgcctcctgagttccagcaattttcttgcctctgcctcctgagtagctggaattacgggcgtgtgccaccaccctcggctaatttttgtatttttagtagagatggggtttcaccatattggccaggctggtctcgaactcctgacctcacgtgatttgcctgcctcagcctcccaaagtgctaggattacaggcttgagccatcgcgcccagcccagagagaataacttaattcatggtgacacctgcaagtcacatggatctttctgcactaccttaggtacttgagggattgcagtttcatcttataatatttttataggtttatagaataccttcaagttttctaccttcaccttttttgtttatagtgtgtgcatgtttctgccaatgaatcacagtctatgaatctaccygtccttgaatctcctgtataaaactctctgtttacccattctctacctgtggcttagtcaactcctggagaaaggttaaagaatgatcttgtggcagtcaagaccttctctctaataggcacaatgtaattaattatgattctgttctaggtttcctgtggcataatgtgatggtcaattttctgcatcaacttgactgggctaagggatgctcagatggcaggtaaaatcattgtgcttgtgagggtgtttccagaagagatttgcctttgaatcagaagacagcaaagatttccttcagcaatgaaggaggcatccaccaaactgtcagggcccagagagaagaaaaagacaggaagggtgaatttgacctctctgactgggacatccatctctgcctatcctgggacctccacactcctggttctctggccttcagacttgatcagggactaacaccatcgcctcccacccccacctttgttctgaggcctttagcctctgaatgataccactggctttcctgcttctctatcctgcagtcggcagatcatgggacttcttcactccaaaattgtgtgagccaattcccataacagatagatawatttataaataaacacacaaatttcctacagccttatcttagtggtgtcacttcaaattttgaagaaccctgacctagtacacatagcaaaaaacaacaacgacgacaacaacaacaaacaaaaacacacacacacacaaaaactcatcatcaataagttttaaaaaatcaaacacaagataaaacgctgcagcatatctattacctgggggcttttctatatggaaagcactttctgagatgccttgcagtaaactccaaggagattttgagggaagatattctcttttctcctggtaaatctccctgttgatgatcattattttaaagactccaaagatgaaaacatctgcttgcacattttgtcgattcattttgggtgagggtctctggcaggcttggaagggtgggtgaacagtggaagggggctgcctctggtgactagcatcactcatatccatgtctgtggcagtcatcaggtgcttattatatattcgacttttggccacccctaatgggggtgttaaatgcaggaagagtccagtcaagtcattgcaaattggcattgacttttgggacctttctacacacgatagtcaggtagataccttctttttaaatttgacttgttattacttttttttgagacagggtctcattctgtcacccaggctggagtgcagtggtgtgatcacggctcattgcagcctcgacttctcaggctccaatgatcctcccacctcagcctctcaagtagctgggaccacaggtaaagggccaccatggccagctaattttcgtatatttggtagacaatgtttcaccatgcttcccaggctgggtggatacttttcaaaaataagttcagttcatcctgcctagccttgccccagcagctctagaggaattacccactctggtgctgggctcaggctgcctgtctctggaataatgtgctcagagctgcagggtaggcctgctgtctgactggcagagagagtcccatactccctaccctgtaccctgaaagatcaaggctgcccagcctgtccacctggtagaccatttccctgcccaattctccttctctcattcctgatgtgcagcttgatgcctgcagggactgtgccagctgagattgtctctaggtcctcccttctgccagctggtgtccagggaagtgggtcctttggcctgcttcctgccaccagaattttgaggaccttgtttctcccactgcaacttttgacccattcctgggtttctttttcttttttttgagacggagtcttactctgtcgctcaggctggagtgcagtggtgcaacctcagctcactacaacctccgcctccccggttcaagcgattctcctgcctcagcttcctgagtagctgggattacaggcacccgccaccaggcctggctaatttttttgcatttttagtacagtcgggatttcaccacgttggctgggttttagactagggtttcttcacctcagcagtactgtcattttggagggcaaaatcatttgttgtggggcactgtcctgagcattgcagggtgttcagcatcctacgcaaactctacccactagatgccatgggcgcttcccagtggtgacaattaacaaagtctccagacagacctacatgtcccctgaggggcaaagttacctccacttgaagaccagtggtgtgctggatggatactaatattaaaataataataataataataatagaaatcataatataactcatgtagttaaggtaagtcctttttgatggaacatttatttcagttaataatatttgtatatgtctgtcctggtagttttttttttttaactttttattttgatttaacatgagagtttgagaaatttacaaaacgaatgaatacaaagacctctgattaccccagattctaacgtttccacatgggctttctcctccctccccaagtccaccagcccctgctccccacctttctgtctctcttcccacccagcaagctccctaggagcacagcaccacttatgacaaaaacatcattttcttttctctgaggcggtattcctgacgtttggatttaggctgataagtgacagtgagttataatcatccttgcctgtgttgtccttcccacgttaggtctgtcatgccacgtatgtccgcagtttataacaatctctatcatacattgaaaagttttgaaaacttatccagtgaatccctgagcaccaaatgttcttttgtgttatttttctttattaggctattattactttattcagaatctctctgttttagagagagcctttctttcttgcctaacctagagtgcagcggcgcgatcatagctcagttcagtcttgaacccctggactcaaccagttctcccccgccctgggcttctgggcgtcctgatctctctcctgaaacccacggggctgggaggtgggaggagatcctactcctagccccatgagcgcgctccaggcctccagattggcccgtttcgggggcagggcgggccgtggggcggggtcgcagcaaggcttcccctctaccctctctgggcctctcacaaacgctgagccccgccccgctgaggcctgtctgcagaatccacagcaaccagcaccatgcccatgacactggggtactggaacatccgcggggtgagcgagggtccgctgggcggtgggacgggggtgcgtgggggyggggaagtgtggagcagctgcaggacgggctctagggacggttcctcttcagggctgtccctgacagcggggtctgtgcttgccgctgtctgtgcgtgtggctgggcgtgcggggtgggggcgggtgaggcaggaacgagaggaggagatggggctccccttgtgcagagtcgtcacaaagtcagggaccctccatctctgacccgagctgtgggccatctctcccagctggcccattccatccgcctgctcctggaatacacagactcaagctacgaggaaaagaagtacacgatgggggacggtaatggcaccctcgagtctgggccctgccccctcacactaagttggcaccaagcaaccgatagtggccacctgtggctgactctgcaggcctcccttgctggaactgcaggctgtcccttccctgagccctggtgagggagctccttgcaaggcagaatgctggggcgggatgctgggcccccgtctgggtaattatgatgggtgtccctcagggcttgcctaaaccctggaagccttagctgtgtggggtccagagccctcactggaattctttttctctgaatcctgggatgtgggactgagtggtcagattctagatccacctgtctcaggggtcttgccactggctccttgggagggtccccaggaaggagggctgggctttggggaggtttgttttcacttcatcttccccaccacagctcctgaytatgacagaagccagtggctgaatgaaaaattcaagctgggcctggactttcccaatgtaggtgcaggggaaggggcggttttgggggaaagtgcgacgtgtctctgactgcatctcctctccccaccttagaggtgttaagatcaggagtcttctgcccaattcctctcactcttggctgtctacacagcccttgcatgatgttctgtgtcccagctcatttattagtgtgacagtatttctatctcaggcctgccatgagcaggccctggtctcctctctgcccttgcatatgggaaggggatgctggggagcctggtggcccaactgagcttccccggtttcccatctatccagctgccctacttgattgatgggactcacaagatcacccagagcaatgccatcctgcggtacattgcccgcaagcacaacctgtgtgagtagatttggttgcaagatgcggggagggaccgtggcctcctcctcggcttggctgggctgtgaggctgagagtgaatctgctttacgagggtaggcggggaatcagaaaaggagcagattcgcgaagacattttggagaaccagtttatggacagccgtatgcagctggccaaactctgctatgacccagattttgtaagtccccccaccccactcccagtctccccttccctactcccagtctcccctttccctgcagagtttgtgtccaaaattgattccttctggtgagttcttggtcttgctgactctaagaatgaagccgcggtcctacacggtgagtgttacagttcttaaagatggtgtgtccggagtttgttccttcagatgttcagatgtgtccgcagtttcttccttccggtgggtttgtggtcttgctgacttcaggggtgaagccgcagaccttcgcagtgagtgctacagctcttaaaggtggcgcgtctggagttgtttattcctcttggtgggttcatggtctggctggcttcaggagtgaagctgcagaccttcatagtgaatgttatagctcataaaggtagttcaaacccaaagagtgagcaacagcaggatttatggtgacgagtgaaagaaaatacacttccacagcctggaagacaacctgagcaggttgctactgctgcttgggaagggcggaggtggggggggaaatcccttatttggccccacccacatgcagattggtccattttacagagagctgattggtccattttacagagtgctgattggtccgttttacagagtgctgattggtctgtttttacagagtgctgattggtgcgtttacaaacctttagctagacacagagcgctgatttgtgcatttacaatcctttggctaggcagaaaagttctccaagtcctcacctgacccagaagcccagccagcttcacctctcattttgatcaggagccaagactgtggtcctgccaaatacacgggtcctgttttctgtttgaactctttagtgctactcatccttcaagctatttcctatactgccaccagagtgaccctcaaaccccaaagtcgtgtcaaataaaacctctaaatcaattccccaccaatctacttatagaatcctgactccccagggtatgaattcactctctagacagtaatggttacttccagaatcccttccatctctgacccatgacctgtgctttgggccatctctcccagtggtttatatcatctgcctgctttaggaatacacaaactatgaggaaaacaagtgcaaaacaaaggagtaatggcacctgaaattttggtgtcttccgagtgctctcttgacatacactgagatcagcgaattttcctaacagacagcttaggggcagccagaggctctttttccccctcctttcttccactcatcctctgaatatctcctcatctttccagaaaccactcaatgtccattgtattcttctgctgcccaactaggaggaaatttctacttctttctctgagctcctttagttctttgcatccttgattctgctcatatctggtccagagcctaccaggtgctcaggtgctcctggggctgacccagaggttgttgggaggtcagtggggacagatttagggacagtgtcacattccgctctgccatcccatcacctcagaaagactccagctacccagttggagtctaataaatgctgatgtatccagctgaagcctggacagtgacccagttccagctgtggggaagatgactgcttgcccgcggccagctggggccatgcacaaaactgggaggccgcatctgtgcagggagcttgtgtctgagggtgttgacagctgttttctgcctcaggagaaactgaaaccagaatacctgcaggmactccctgaaawgctraagctctactcacagtttctggggaagcagccatggtttcttggggacaaggtaatgggggcgtgtgatggggacaccacagatttgtcatacttcctatattatggaggtttcagcccacatatccttggccttatccagatcacctttgtggatttcatcgcttat
